(19) United States
(12) Patent Application Publication
(10) Pub. No.: US 2018/0169238 A1
(43) Pub. Date: Jun. 21, 2018

(54) ANTI-TIGIT ANTIBODIES, ANTI-PVRIG ANTIBODIES AND COMBINATIONS THEREOF

(71) Applicants: Mark White, Antioch, CA (US); Sandeep Kumar, San Bruno, CA (US); Christopher Chan, South San Francisco, CA (US); Spencer Liang, San Mateo, CA (US); Lance Stapleton, Oakland, CA (US); Andrew W. Drake, Mountain View, CA (US); Yosi Gozlan, Tel Aviv (IL); Ilan Vaknin, Tel Aviv (IL); Shirley Sameah-Greenwald, Kfar Saba (IL); Liat Dassa, Tel Aviv (IL); Zohar Tiran, Oranit (IL); Gad S. Cojocaru, Tel Aviv (IL); Maya Kotturi, Belmont, CA (US); Hsin-Yuan Cheng, San Mateo, CA (US); Kyle Hansen, San Francisco, CA (US); David Nisim Giladi, Netaniya (IL); Einav Safyon, Raanana (IL); Eran Ophir, Even Yehuda (IL); Leonard Presta, San Francisco, CA (US); Richard Theolis, Santa Cruz, CA (US); Radhika Desai, Brisbane, CA (US); Patrick Wall, Mill Valley, CA (US)

(72) Inventors: Mark White, Antioch, CA (US); Sandeep Kumar, San Bruno, CA (US); Christopher Chan, South San Francisco, CA (US); Spencer Liang, San Mateo, CA (US); Lance Stapleton, Oakland, CA (US); Andrew W. Drake, Mountain View, CA (US); Yosi Gozlan, Tel Aviv (IL); Ilan Vaknin, Tel Aviv (IL); Shirley Sameah-Greenwald, Kfar Saba (IL); Liat Dassa, Tel Aviv (IL); Zohar Tiran, Oranit (IL); Gad S. Cojocaru, Tel Aviv (IL); Maya Kotturi, Belmont, CA (US); Hsin-Yuan Cheng, San Mateo, CA (US); Kyle Hansen, San Francisco, CA (US); David Nisim Giladi, Netaniya (IL); Einav Safyon, Raanana (IL); Eran Ophir, Even Yehuda (IL); Leonard Presta, San Francisco, CA (US); Richard Theolis, Santa Cruz, CA (US); Radhika Desai, Brisbane, CA (US); Patrick Wall, Mill Valley, CA (US)

(21) Appl. No.: 15/795,135

(22) Filed: Oct. 26, 2017

Related U.S. Application Data
(63) Continuation of application No. 15/680,187, filed on Aug. 17, 2017.
(60) Provisional application No. 62/513,771, filed on Jun. 1, 2017.
(60) Provisional application No. 62/376,335, filed on Aug. 17, 2016.
(60) Provisional application No. 62/417,217, filed on Nov. 3, 2016.
(60) Provisional application No. 62/513,775, filed on Jun. 1, 2017.
(60) Provisional application No. 62/477,974, filed on Mar. 28, 2017.
(60) Provisional application No. 62/513,916, filed on Jun. 1, 2017.
(60) Provisional application No. 62/538,561, filed on Jul. 28, 2017.
(60) Provisional application No. 62/376,334, filed on Aug. 17, 2016.

(51) Int. Cl. A61K 39/395

(52) U.S. Cl. CPC A61K 39/39558; A61K 2039/507; A61K 39/39541

(57) ABSTRACT

Anti-PVRIG and anti-TIGIT antibodies are provided.

### I. RELATED APPLICATIONS

[0001] This application is a continuation of U.S. patent application Ser. No. 15/680,187, filed on Aug. 17, 2017 which claims priority to U.S. Application Ser. No. 62/376,334, filed on Aug. 17, 2016, U.S. Application Ser. No. 62/513,771 filed on Jun. 1, 2017, U.S. Application Ser. No. 62/376,335, filed on Aug. 17, 2016, U.S. Application Ser. No. 62/417,217, filed on Nov. 3, 2016, U.S. Application Ser. No. 62/513,775, filed on Jun. 1, 2017, U.S. Application Ser. No. 62/477,974, filed on Mar. 28, 2017, U.S. Application Ser. No. 62/513,916, filed on Jun. 1, 2017, and U.S. Application Ser. No. 62/538,561, filed on Jul. 28, 2017, all of which are incorporated by reference herein in their entireties.

### SEQUENCE LISTING

[0002] The instant application contains a Sequence Listing which has been submitted electronically in ASCII format and is hereby incorporated by reference in its entirety. Said ASCII copy, created on Oct. 25, 2017 and amended on Feb. 7, 2018, is named 114386-5008-US01_ST25_V2.txt and is 593,420 bytes in size.

### II. BACKGROUND OF THE INVENTION

[0003] Naïve T cells must receive two independent signals from antigen-presenting cells (APC) in order to become productively activated. The first, Signal 1, is antigen-specific and occurs when T cell antigen receptors encounter the appropriate antigen-MHC complex on the APC. The fate of the immune response is determined by a second, antigen-independent signal (Signal 2) which is delivered through a T cell costimulatory molecule that engages its APC-expressed ligand. This second signal could be either stimulatory (positive costimulation) or inhibitory (negative costimulation or coinhibition). In the absence of a costimulatory signal, or in the presence of a coinhibitory signal, T-cell activation is impaired or aborted, which may lead to a state of antigen-specific unresponsiveness (known as T-cell anergy), or may result in T-cell apoptotic death.

[0004] Costimulatory molecule pairs usually consist of ligands expressed on APCs and their cognate receptors expressed on T cells. The prototype ligand/receptor pairs of costimulatory molecules are B7/CD28 and CD40/CD40L. The B7 family consists of structurally related, cell-surface protein ligands, which may provide stimulatory or inhibitory input to an immune response. Members of the B7 family are structurally related, with the extracellular domain containing at least one variable or constant immunoglobulin domain.

[0005] Both positive and negative costimulatory signals play critical roles in the regulation of cell-mediated immune responses, and molecules that mediate these signals have proven to be effective targets for immunomodulation. Based on this knowledge, several therapeutic approaches that involve targeting of costimulatory molecules have been developed, and were shown to be useful for prevention and treatment of cancer by turning on, or preventing the turning off, of immune responses in cancer patients and for prevention and treatment of autoimmune diseases and inflammatory diseases, as well as rejection of allogenic transplantation, each by turning off uncontrolled immune responses, or by induction of “off signal” by negative costimulation (or coinhibition) in subjects with these pathological conditions.

[0006] Manipulation of the signals delivered by B7 ligands has shown potential in the treatment of autoimmunity, inflammatory diseases, and transplant rejection. Therapeutic strategies include blocking of costimulation using monoclonal antibodies to the ligand or to the receptor of a costimulatory pair, or using soluble fusion proteins composed of the costimulatory receptor that may bind and block its appropriate ligand. Another approach is induction of co-inhibition using soluble fusion protein of an inhibitory ligand. These approaches rely, at least partially, on the eventual deletion of auto- or allo-reactive T cells (which are responsible for the pathogenic processes in autoimmune diseases or transplantation, respectively), presumably because in the absence of costimulation (which induces cell survival genes) T cells become highly susceptible to induction of apoptosis. Thus, novel agents that are capable of modulating costimulatory signals, without compromising the immune system's ability to defend against pathogens, are highly advantageous for treatment and prevention of such pathological conditions.

[0007] Costimulatory pathways play an important role in tumor development. Interestingly, tumors have been shown to evade immune destruction by impeding T cell activation through inhibition of co-stimulatory factors in the B7-CD28 and TNF families, as well as by attracting regulatory T cells, which inhibit anti-tumor T cell responses (see Wang (2006), “Immune Suppression by Tumor Specific CD4⁺ Regulatory T cells in Cancer”, Semin. Cancer. Biol. 16:73-79; Greenwald, et al. (2005), “The B7 Family Revisited”, Ann. Rev. Immunol. 23:515-48; Watts (2005), “TNF/TNFR Family Members in Co-stimulation of T Cell Responses”, Ann. Rev. Immunol. 23:23-68; Sadum, et al., (2007) “Immune Signatures of Murine and Human Cancers Reveal Unique Mechanisms of Tumor Escape and New Targets for Cancer Immunotherapy”, Clin. Canc. Res. 13(13): 4016-4025). Such tumor expressed co-stimulatory molecules have become attractive cancer biomarkers and may serve as tumor-associated antigens (TAAs). Furthermore, costimulatory pathways have been identified as immunologic checkpoints that attenuate T cell dependent immune responses, both at the level of initiation and effector function within tumor metastases. As engineered cancer vaccines continue to improve, it is becoming clear that such immunologic checkpoints are a major barrier to the vaccines' ability to induce therapeutic anti-tumor responses. In that regard, costimulatory molecules can serve as adjuvants for active (vaccination) and passive (antibody-mediated) cancer immunotherapy, providing strategies to thwart immune tolerance and stimulate the immune system.

[0008] Over the past decade, agonists and/or antagonists to various costimulatory proteins have been developed for treating autoimmune diseases, graft rejection, allergy and cancer. For example, CTLA4-Ig (Abatacept, Orencia®) is approved for treatment of RA, mutated CTLA4-Ig (Belatacept, Nulojix®) for prevention of acute kidney transplant rejection and by the anti-CTLA4 antibody (Ipilimumab, Yervoy®), recently approved for the treatment of melanoma. Other costimulation regulators have been approved, such as the anti-PD-1 antibodies of Merck (Keytruda®) and BMS (Opdivo®), have been approved for cancer treatments and are in testing for viral infections as well.

[0009] However, while monotherapy with anti-checkpoint inhibitor antibodies have shown promise, a number of studies (Ahmadzadeh et al., Blood 114:1537 (2009), Matsuzaki et al., PNAS 107(17):7875-7880 (2010), Fourcade et al., Cancer Res. 72(4):887-896 (2012) and Gros et al., J. Clinical Invest. 124(5):2246 (2014)) examining tumor-infiltrating lymphocytes (TILs) have shown that TILs commonly express multiple checkpoint receptors. Moreover, it is likely that TILs that express multiple checkpoints are in fact the most tumor-reactive. In contrast, non-tumor reactive T cells in the periphery are more likely to express a single checkpoint. Checkpoint blockade with monospecific full-length antibodies is likely nondiscriminatory with regards to de-repression of tumor-reactive TILs versus autoantigen-reactive single expressing T cells that are assumed to contribute to autoimmune toxicities.

[0010] One target of interest is PVRIG. PVRIG, also called Poliovirus Receptor Related Immunoglobulin Domain Containing Protein, Q6DKI7 or C7orf15, is a transmembrane domain protein of 326 amino acids in length, with a signal peptide (spanning from amino acid 1 to 40), an extracellular domain (spanning from amino acid 41 to 171), a transmembrane domain (spanning from amino acid 172 to 190) and a cytoplasmic domain (spanning from amino acid 191 to 326). PVRIG binds to Poliovirus receptor-related 2 protein (PVLR2, also known as nectin-2, CD112 or herpesvirus entry mediator B, (HVEB) a human plasma membrane glycoprotein), the binding partner of PVRIG.

[0011] Another target of interest is TIGIT. TIGIT is a coinhibitory receptor that is highly expressed on effector & regulatory (Treg) CD4+ T cells, effector CD8+ T cells, and NK cells. TIGIT has been shown to attenuate immune response by (1) direct signaling, (2) inducing ligand signaling, and (3) competition with and disruption of signaling by the costimulatory receptor CD226 (also known as DNAM-1). TIGIT signaling has been the most well-studied in NK cells, where it has been demonstrated that engagement with its cognate ligand, poliovirus receptor (PVR, also known as CD155) directly suppresses NK cell cytotoxicity through its cytoplasmic ITIM domain. Knockout of the TIGIT gene or antibody blockade of the TIGIT/PVR interaction has shown to enhance NK cell killing in vitro, as well as to exacerbate autoimmune diseases in vivo. In addition to its direct effects on T- and NK cells, TIGIT can induce PVR-mediated signaling in dendritic or tumor cells, leading to the increase in production of anti-inflammatory cytokines such as IL10. In T-cells TIGIT can also inhibit lymphocyte responses by disrupting homodimerization of the costimulatory receptor CD226, and by competing with it for binding to PVR.

[0012] TIGIT is highly expressed on lymphocytes, including Tumor Infiltrating Lymphocytes (TILs) and Tregs, that infiltrate different types of tumors. PVR is also broadly expressed in tumors, suggesting that the TIGIT-PVR signaling axis may be a dominant immune escape mechanism for cancer. Notably, TIGIT expression is tightly correlated with the expression of another important coinhibitory receptor, PD1. TIGIT and PD1 are co-expressed on the TILs of numerous human and murine tumors. Unlike TIGIT and CTLA4, PD1 inhibition of T cell responses does not involve competition for ligand binding with a costimulatory receptor.

[0013] Accordingly, TIGIT is an attractive target for monoclonal antibody therapy, and in addition in combination with additional antibodies including anti-PVRIG antibodies.

### III. BRIEF SUMMARY OF THE INVENTION

[0014] Accordingly, in one aspect, the invention provides compositions comprising an antigen binding domain that binds to human TIGIT (SEQ ID NO:97) comprising a variable heavy domain comprising SEQ ID NO:160 and a variable light domain comprising SEQ ID NO:165. Additionally, the antigen binding domain comprises a variable heavy domain comprising SEQ ID NO:150 and a variable light domain comprising SEQ ID NO:155. Additionally, the antigen binding domain comprises a variable heavy domain comprising SEQ ID NO:560 and a variable light domain comprising SEQ ID NO:565.

[0015] In a further aspect, the invention provides composition comprising antibodies comprising a heavy chain comprising VH-CH1-hinge-CH2-CH3, wherein said VH comprises SEQ ID NO:160 and a light chain comprising VL-VC, wherein said VL comprising SEQ ID NO:165 and VC is either kappa or lambda. Additionally, the antibody can comprise a heavy chain comprising VH-CH1-hinge-CH2-CH3, wherein the VH comprises SEQ ID NO:150; and a light chain comprising VL-VC, wherein said VL comprising SEQ ID NO:159 and VC is either kappa or lambda. Additionally, the antibody can comprise a heavy chain comprising VH-CH1-hinge-CH2-CH3, wherein the VH comprises SEQ ID NO:560; and a light chain comprising VL-VC, wherein said VL comprising SEQ ID NO:565 and VC is either kappa or lambda.

[0016] In some aspects, the sequence of the CH1-hinge-CH2-CH3 is selected from human IgG1, IgG2 and IgG4, and variants thereof. In some aspects, the heavy chain has SEQ ID NO:164 and the light chain has SEQ ID NO:169.

[0017] In an additional aspect, the compositions can further comprise a second antibody that binds to a human checkpoint receptor protein, which can be human PD-1 or human PVRIG. The second antibody can comprise an antigen binding domain comprising a variable heavy domain comprising SEQ ID NO:5 and a variable light domain comprising SEQ ID NO:10, or a heavy chain having SEQ ID NO:9 and a light chain having SEQ ID NO:14.

[0018] In a further aspect, the invention provides nucleic acid compositions comprising a first nucleic acid encoding a variable heavy domain comprising SEQ ID NO:160 and a second nucleic acid encoding a variable light domain comprising SEQ ID NO:165. Alternatively, the nucleic acid compositions comprise a first nucleic acid encoding a variable heavy domain comprising SEQ ID NO:150 and a second nucleic acid encoding a variable light domain comprising SEQ ID NO:155. Alternatively, the nucleic acid compositions comprise a first nucleic acid encoding a variable heavy domain comprising SEQ ID NO:560 and a second nucleic acid encoding a variable light domain comprising SEQ ID NO:565.

[0019] In a further aspect, the invention provides expression vector compositions comprising these nucleic acid compositions are provided as well, such as a first expression vector comprising a first nucleic acid and a second expression vector comprising a second nucleic acid, or alternatively an expression vector that comprises both first and second nucleic acids.

[0020] In an additional aspect, the invention provides host cells comprising the expression vector compositions, and methods of making the antibodies comprising culturing the host cells under conditions wherein the antibodies are produced and recovering the antibody.

[0021] In a further aspect the invention provides anti-PVRIG antibodies comprising a heavy chain having SEQ ID NO:9 and a light chain having SEQ ID NO:14. The invention further provides antibodies having a heavy chain having SEQ ID NO:19; and a light chain having SEQ ID NO:24.

[0022] In an additional aspect, an anti-PVRIG antibody (either CHA.7.518.1.H4(S241P) or CHA.7.538.1.2.H4(S241P) are co-administered with a second antibody that binds to a human checkpoint receptor protein, such as an antibody that binds PD-1.

[0023] In a further aspect, an anti-PVRIG antibody (either CHA.7.518.1.H4(S241P) or CHA.7.538.1.2.H4(S241P)) are co-administered with a second antibody that binds to a human checkpoint receptor protein, such as an antibody that binds human TIGIT, such as CPA.9.086 or CPA.9.083 or CHA.9.547.13.

[0024] In a further aspect, the invention provides nucleic acid compositions comprising a first nucleic acid encoding the heavy chain of either CHA.7.518.1.H4(S241P) or CHA.7.538.1.2.H4(S241P)) and a second nucleic acid encoding the light chain of either CHA.7.518.1.H4(S241P) or CHA.7.538.1.2.H4(S241P), respectively.

[0025] In a further aspect, the invention provides expression vector compositions comprising these nucleic acid compositions are provided as well, such as a first expression vector comprising a first nucleic acid and a second expression vector comprising a second nucleic acid, or alternatively an expression vector that comprises both first and second nucleic acids.

[0026] In an additional aspect, the invention provides host cells comprising the expression vector compositions, and methods of making the antibodies comprising culturing the host cells under conditions wherein the antibodies are produced and recovering the antibody.

[0027] In a further aspect, the invention provides methods comprising: a) providing a cell population from a tumor sample from a patient; b) staining said population with labeled antibodies that bind: i) TIGIT protein; ii) PVR protein; iii) PD-1 protein; iv) PD-L1 protein; and v) an isotype control; c) running fluorescence activated cell sorting (FACS); d) for each of TIGIT, PVR, PD-1 and PD-L1, determining the percentage of cells in said population that express the protein relative to said isotype control antibody; wherein if the percentage of positive cells is ≥1% for all 4 receptors, e) administering antibodies to TIGIT and PD-1 to said patient.

[0028] In an additional aspect, the invention provides methods comprising: a) providing a cell population from a tumor sample from a patient; b) staining said population with labeled antibodies that bind: i) PVRIG protein; PVRL2 protein; PD-1 protein; iv) PD-L1 protein; and v) an isotype control; c) running fluorescence activated cell sorting (FACS); d) for each of PVRIG, PVRL2, PD-1 and PD-L1, determining the percentage of cells in said population that express the protein relative to said isotype control antibody; wherein if the percentage of positive cells is ≥1% for all 4 receptors, e) administering antibodies to PVRIG and PD-1 to said patient.

[0029] In a further aspect, the invention provides methods comprising a) providing a cell population from a tumor sample from a patient; b) staining said population with labeled antibodies that bind: i) PVRIG protein; ii) PVRL2 protein; iii) TIGIT protein; iv) PVR protein; and v) an isotype control; c) running fluorescence activated cell sorting (FACS); d) for each of PVRIG, PVRL2, TIGIT and PVR, determining the percentage of cells in said population that express the protein relative to said isotype control antibody; wherein if the percentage of positive cells is ≥1% for all 4 receptors, e) administering antibodies to PVRIG and TIGIT to said patient.

### IV. BRIEF DESCRIPTION OF THE DRAWINGS

[0030] FIG. 1 depicts the full-length sequence of human PVRIG (showing two different methionine starting points). The signal peptide is underlined, the ECD is double underlined. PVRIG, also called Poliovirus Receptor Related Immunoglobulin Domain Containing Protein, Q6DKI7 or C7orf15, relates to amino acid and nucleic acid sequences shown in RefSeq accession identifier NP_076975, shown in FIG. 1.

[0031] FIG. 2 depicts the sequence of the human Poliovirus receptor-related 2 protein (PVLR2, also known as nectin-2, CD112 or herpesvirus entry mediator B, (HVEB)), the binding partner of PVRIG. PVLR2 is a human plasma membrane glycoprotein.

[0032] FIGS. 3A and 3B depicts the variable heavy and light chains as well as the vhCDR1, vhCDR2, vhCDR3, vlCDR1, vlCDR2 and vlCDR3 sequences of each of the enumerated CHA antibodies of the invention, CHA.7.518.1.H4(S241P), and CHA.7.538.1.2.H4(S241P).

[0033] FIGS. 4A and 4B PVRIG antibodies increase T cell proliferation in the MLR. The percentages of CFSE low cells are shown from MLR assays treated with the indicated PVRIG antibodies. Each graph represents one individual CD3 T cell donor. The experiments are described in Example 23 of U.S. Ser. No. 15/048,967, incorporated by reference herein.

[0034] FIGS. 5A and 5B PVRIG hybridoma antibody binding characteristics to HEK hPVRIG engineered cell lines, HEK parental cells, and Jurkat cells. HEK OE denotes HEK hPVRIG cells, HEK par denotes HEK parental cells. For Jurkat data, gMFIr indicates the fold difference in geometric MFI of PVRIG antibody staining relative to their controls. Concentration indicates that at which the gMFIr was calculated. No binding indicates antibody does not bind to the tested cell line. Highlighted antibodies are the ‘top four’ antibodies of interest.

[0035] FIGS. 6A and 6B PVRIG hybridoma antibody binding characteristics to primary human PBMC, cyno over-expressing cells, and cyno primary PBMC. Expi cyno OE denotes expi cells transiently transfected with cPVRIG, expi par denotes expi parental cells. gMFIr indicates the fold difference in geometric MFI of PVRIG antibody staining relative to their controls. Concentrations indicate that at which the gMFIr was calculated. Not tested indicates antibodies that were not tested due to an absence of binding to human HEK hPVRIG, expi cPVRIG cells, or not meeting binding requirements to PBMC subsets. Highlighted antibodies are the ‘top four’ antibodies of interest. The experiments are described in Example 21 of U.S. Ser. No. 15/048,967, incorporated by reference herein.

[0036] FIGS. 7A and 7B Summary of blocking capacity of PVRIG antibodies in the FACS-based competition assay. The IC₅₀ of inhibition is indicated. No IC₅₀ indicates that these antibodies are non-blockers. Highlighted antibodies are the ‘top four’ antibodies of interest. The experiments are described in Example 21 of U.S. Ser. No. 15/048,967, incorporated by reference herein.

[0037] FIGS. 8A and 8B TILs were co-cultured with melanoma cells 624 at 1:1 E:T for 18 hr in the presence of anti-PVRIG Ab (CPA.7.021; 10 ug/ml) , anti-TIGIT (10A7 clone; 10 ug/ml) or in combination. Supernatant was collected and tested in Th1 Th2 Th17 cytometric bead array assay to detect secreted cytokines. IFNγ (A) and TNF (B) levels were detected. Treatments were compared by Student's t-test (*P≤0.05, **P≤0.01) of triplicate samples.

[0038] FIG. 9A-9F MART-1 or 209 TILs were co-cultured with melanoma cells 624 at 1:1 E:T for 18 hr in the presence of anti-PVRIG Ab (CPA.7.021; 10 ug/ml), anti-DNAM1 (DX11 clone, BD Biosciences Cat. No. 559787; 10 ug/ml) or in combination. Supernatant was collected and tested in Th1 Th2 Th17 cytometric bead array assay to detect secreted cytokines. IFNγ (A,D) and TNF (B,E) levels were detected. TILs were stained for surface expression of CD137 (C,F).

[0039] FIGS. 10A and 10B TILs (F4) were co-cultured with melanoma cells 624 at 1:3 E:T for 18 hr in the presence of anti-PVRIG Ab (CPA.7.021; 10 ug/ml), anti-TIGIT (10A7 clone; 10 ug/ml), anti-PD1 (mAb 1B8, Merck; 10 ug/ml) or in combination. Supernatant was collected and tested in Th1 Th2 Th17 cytometric bead array assay to detect secreted cytokines. IFNγ (A) and TNF (B) levels were detected.

[0040] FIG. 11A-11E depict four humanized sequences for each of CHA.7.518, CHA.7.524, CHA.7.530, CHA.7.538_1 and CHA.7.538_2. All humanized antibodies comprise the H4(S241P) substitution. Note that the light chain for CHA.7.538_2 is the same as for CHA.7.538_1. The “H1” of each is a “CDR swap” with no changes to the human framework. Subsequent sequences alter framework changes shown in larger bold font. CDR sequences are noted in bold. CDR definitions are AbM from website www.bioinf.org.uk/abs/. Human germline and joining sequences from IMGT® the international ImMunoGeneTics® information system www.imgt.org (founder and director: Marie-Paule Lefranc, Montpellier, France). Residue numbering shown as sequential (seq) or according to Chothia from website www.bioinf.org.uk/abs/ (AbM). “b” notes buried sidechain; “p” notes partially buried; “i” notes sidechain at interface between VH and VL domains. Sequence differences between human and murine germlines noted by asterisk (*). Potential additional mutations in frameworks are noted below sequence. Potential changes in CDR sequences noted below each CDR sequence as noted on the figure (# deamidation substitutions: Q/S/A; these may prevent asparagine (N) deamidation. @ tryptophan oxidation substitutions: Y/F/H; these may prevent tryptophan oxidation; @ methionine oxidation substitutions: L/F/A).

[0041] FIG. 12A-12C depicts a collation of the humanized sequences of three CHA antibodies: CHA.7.518, CHA.7.538.1, and CHA.7.538.2.

[0042] FIG. 13 depicts schemes for combining the humanized VH and VL CHA antibodies. The “chimVH” and “chimVL” are the mouse variable heavy and light sequences attached to a human IgG constant domain.

[0043] FIG. 14 PVRIG hybridoma antibody binding characteristics to primary human PBMC, cyno over-expressing cells, and cyno primary PBMC. Expi cyno OE denotes expi cells transiently transfected with cPVRIG, expi par denotes expi parental cells. gMFIr indicates the fold difference in geometric MFI of PVRIG antibody staining relative to their controls. Concentrations indicate that at which the gMFIr was calculated. Not tested indicates antibodies that were not tested due to an absence of binding to human HEK hPVRIG, expi cPVRIG cells, or not meeting binding requirements to PBMC subsets. Highlighted antibodies are four antibodies for which humanization was done (See FIG. 24). The experiments are described in Example 21 of U.S. Ser. No. 15/048,967, incorporated by reference herein.

[0044] FIG. 15. Summary of blocking capacity of PVRIG antibodies in the FACS-based competition assay. The IC50 of inhibition is indicated. No IC50 indicates that these antibodies are non-blockers. Highlighted antibodies are four antibodies for which humanization was done (See FIG. 24).

[0045] FIG. 16. Summary of the activity of select PVRIG antibodies in NK cell cytotoxicity assays against Reh and MOLM-13 cells. Fold change in cytotoxicity relative to control was calculated by dividing the absolute level of killing (%) in the condition with PVRIG antibody, by the absolute level of killing (%) with control antibody. Fold change is calculated from the 5:1 effector to target ratio.

[0046] FIG. 17. Sequence alignment of PVRIG orthologs. Aligned sequences of the human, cynomolgus, marmoset, and rhesus PVRIG extra-cellular domain. The differences between human and cynomolgus are highlighted in yellow.

[0047] FIG. 18A-18F. Binding of anti-human PVRIG antibodies to cyno, human, cyno/human hybrid PVRIG variants. Binding of antibodies to wild type cyno PVRIG (●), H61R cyno PVRIG (▪), P67S cyno PVRIG (▴), L95R/T97I cyno PVRIG (▾), and wild type human PVRIG (♦) are shown. The ELISA signals are plotted as a function of antibody concentration.

[0048] FIG. 19. Correlation of epitope group and cyno cross-reactivity of anti-human PVRIG antibodies.

[0049] FIGS. 20A and 20B (A) Specificity of CHA.7.518.1.H4(S241P) towards HEK cells engineered to overexpress PVRIG and HEK parental cells. Data shows absolute geometric MFI (gMFI) measurements as a function of increasing antibody concentration. (B) Specificity of CHA.7.538.1.2.H4(S241P) towards HEK cells engineered to overexpress PVRIG and HEK parental cells. Data shows absolute geometric MFI (gMFI) measurements as a function of increasing antibody concentration.

[0050] FIGS. 21A and 21B illustrates the ability of CHA.7.518.1.H4(S241P) (A) and CHA.7.538.1.2.H4(S241P) (B) to bind Jurkat cells that endogenously express PVRIG confirmed by RNA expression. (A) Binding of CHA.7.518.1.H4(S241P) to Jurkat cells. Data shows absolute geometric MFI (gMFI) measurements as a function of increasing antibody concentration. Isotype staining is shown as a negative control. (B) Binding of CHA.7.538.1.2.H4(S241P) to Jurkat cells. Data shows absolute geometric MFI (gMFI) measurements as a function of increasing antibody concentration. Isotype staining is shown as a negative control. Both antibodies are able to bind Jurkat cells with a comparable affinity to HEK hPVRIG cells.

[0051] FIG. 22 illustrates the ability of CHA.7.518.1.H4(S241P) and CHA.7.538.1.2.H4(S241P) to bind CD8 T cells that were expanded by exposure to CMV peptide (494-503, NLVPMVATV) and endogenously express PVRIG confirmed by RNA expression. Binding of CHA.7.518.1.H4(S241P) and CHA.7.538.1.2.H4(S241P) to CMV peptide-expanded CD8 T cells. Data shows absolute geometric MFI (gMFI) measurements as a function of increasing antibody concentration. Isotype staining is shown as a negative control.

[0052] FIGS. 23A and 23B. (A) Specificity of CHA.7.518.1.H4(S241P) towards expi cells engineered to overexpress cynomolgus PVRIG and expi parental cells. Data shows absolute geometric MFI (gMFI) measurements as a function of increasing antibody concentration. Specificity of CHA.7.538.1.2.H4(S241P) towards expi cells engineered to overexpress cynomolgus PVRIG and expi parental cells. Data shows absolute geometric MFI (gMFI) measurements as a function of increasing antibody concentration.

[0053] FIGS. 24A and 24B. (A) Blocking of PVRIG Fc to HEK cells by CHA.7.518.1.H4(S241P) and CHA.7.538.1.2.H4(S241P). Data shows the percentage of PVRIG Fc binding to HEK cells as a function of increasing antibody concentration relative to maximum PVRIG Fc-induced signal and secondary only background. (B) Effect of CHA.7.544 on the binding of PVRIG Fc to HEK cells. Data shows the absolute gMFI derived from PVRIG Fc binding to HEK cells in the presence of escalating concentrations of CHA.7.544. The amount of PVRIG Fc binding was detected by an anti-mouse Fc secondary conjugated to Alexa 647.

[0054] FIGS. 25A and 25B. (A) Blocking of PVRL2 Fc to HEK hPVRIG cells by CHA.7.518.1.H4(S241P), CHA.7.538.1.2.H4(S241P), and CHA.7.530.3. Data shows the percentage of PVRL2 Fc binding to HEK hPVRIG cells as a function of increasing antibody concentration relative to maximum PVRL2 Fc-induced signal and secondary only background. (B) Effect of CHA.7.544 on PVRL2 Fc binding to HEK hPVRIG cells. Data shows the percentage of PVRL2 Fc binding to HEK hPVRIG cells as a function of increasing antibody concentration relative to maximum PVRL2 Fc-induced signal and secondary only background.

[0055] FIG. 26. Shows the percentage of Alexa 647 conjugated CHA.7.518.1.H4(S241P) and CHA.7.538.1.2.H4(S241P) binding relative to their maximum signal upon pre-incubation of Jurkat cells with unconjugated CHA.7.518.1.H4(S241P), CHA.7.538.1.2.H4(S241P) and an isotype control.

[0056] FIGS. 27A and 27B A) Humanized PVRIG antibodies, CHA.7.518.1.H4(S241P) and CHA.7.538.1.2.H4(S241P), increase CD4+ T cell proliferation. Representative data (n≥2) shows the percentage of CFSE low, proliferating CD4+ T cells (mean plus standard deviation) from a single human CD4+ T cell donor when co-cultured with the CHO-S OKT3 hPVRL2 cells in the presence of an anti-DNAM-1 antibody or different anti-PVRIG antibodies or IgG isotype controls. The dashed line indicates the baseline percentage of CFSE low, CD4+ T cells proliferating after treatment with the human IgG4 isotype control antibody. The numbers refer to the percent increase or decrease in proliferation of the anti-PVRIG or anti-DNAM-1 antibody treatments, respectively, compared to the relevant isotype control antibodies (B) Humanized PVRIG antibodies, CHA.7.518.1.H4(S241P) and CHA.7.538.1.2.H4(S241P), increase CD4+ T cell proliferation in an hPVRL2-dependent manner. Representative data (n≥2) shows the percentage of CFSE low, proliferating CD4+ T cells (mean plus standard deviation) from a single human CD4+ T cell donor in response to co-culture with the CHO-S OKT3 parental, or CHO-S OKT3 hPVRL2 cells in the presence of an anti-DNAM-1 antibody or different anti-PVRIG antibodies or IgG isotype controls. The dashed line indicates the baseline percentage of CFSE low CD4+ T cells proliferating after treatment with either the human IgG4 or the mouse IgG1 isotype antibodies. The numbers refer to the percent increase or decrease in proliferation of the anti-PVRIG or anti-DNAM-1 antibody treatments, respectively, compared to the relevant isotype control antibodies.

[0057] FIG. 28A-28C. (A) Humanized PVRIG antibodies, CHA.7.518.1.H4(S241P) and CHA.7.538.1.2.H4(S241P), increase CD8+ T cell proliferation. Representative data (n≥2) shows the percentage of CFSE low, proliferating CD8+ T cells (mean plus standard deviation) from a single human CD8+ T cell donor (Donor 232) when co-cultured with the CHO-S OKT3 hPVRL2 cells in the presence of an anti-DNAM-1 antibody or different anti-PVRIG antibodies or IgG isotype controls. The dashed line indicates the baseline percentage of CFSE low, CD8+ T cells proliferating after treatment with the mouse IgG1 or human IgG4 isotype antibodies. The numbers refer to the percent increase or decrease in proliferation of the anti-PVRIG or anti-DNAM-1 antibody treatments, respectively, compared to the relevant isotype control antibodies. (B) Humanized PVRIG antibodies, CHA.7.518.1.H4(S241P) and CHA.7.538.1.2.H4(S241P), increase CD8+ T cell proliferation. Representative data (n≥2) shows the percentage of CFSE low, proliferating CD8+ T cells (mean plus standard deviation) from a single human CD8+ T cell donor (Donor 234) when co-cultured with the CHO-S OKT3 hPVRL2 cells in the presence of an anti-DNAM-1 antibody or different anti-PVRIG antibodies or IgG isotype controls. The dashed line indicates the baseline percentage of CFSE low, CD8+ T cells proliferating after treatment with the mouse IgG1 or human IgG4 isotype antibodies. The numbers refer to the percent increase or decrease in proliferation of the anti-PVRIG or anti-DNAM-1 antibody treatments, respectively, compared to the relevant isotype control antibodies. (C) Humanized PVRIG antibodies, CHA.7.518.1.H4(S241P) and CHA.7.538.1.2.H4(S241P), increase IFNγ secretion from CD8+ T cells. Representative data (n≥2) shows the pg/ml of IFNγ produced (mean plus standard deviation) by three different human CD8+ T cell donors (Donors 231, 232, and 234) when co-cultured with the CHO-S OKT3 hPVRL2 cells in the presence of an anti-DNAM-1 antibody or different anti-PVRIG antibodies or IgG isotype controls. The dashed line indicates the baseline IFNγ production following treatment with the human IgG4 isotype antibody. The numbers refer to the percent increase in IFNγ secretion of the anti-PVRIG antibody treatments compared to the IgG4 isotype control.

[0058] FIG. 29. Humanized PVRIG antibodies, CHA.7.518.1.H4(S241P) and CHA.7.538.1.2.H4(S241P), consistently increase CD4+ T cell proliferation across multiple donors, while CHA.7.530.3 and CHA.7.544 do not. The percent proliferation relative to the isotype control was calculated by dividing the percentage of CFSE low, CD4+ T cells after PVRIG antibody treatment over the isotype antibody treatment for each donor. The percent proliferation for the isotype antibody treatment was set at zero. Each symbol in the graph represents a different donor.

[0059] FIG. 30A-30D. (A) Dose-dependent effect of the humanized PVRIG antibodies, CHA.7.518.1.H4(S241P) and CHA.7.538.1.2.H4(S241P), on CD4+ T cell proliferation. Representative data (n≥2) with 2 different human donors shows the mean percentage of proliferating CD4+ T cells following a dose titration of 66 nM to 0.726 nM with either the human IgG4 isotype, CHA.7.518.1.H4(S241P), or CHA.7.538.1.2.H4(S241P) antibodies. The estimated EC50 is within the single digit nM range. (B) Dose-dependent effect of the humanized PVRIG antibodies, CHA.7.518.1.H4(S241P) and CHA.7.538.1.2.H4(S241P), on CD8+ T cell proliferation. Representative data (n≥2) with 2 different human donors shows the mean percentage of proliferating CD8+ T cells following a dose titration of 66 nM to 0.264 nM with either the human IgG4 isotype, CHA.7.518.1.H4(S241P), CHA.7.38.1.2, or CHA.7.544 antibodies. The estimated EC50 is within the single digit nM range.

[0060] FIG. 31A-31C. (A) Flow cytometry analysis of TIGIT and PVRIG expression on TILs and PVR, PVRL2 expression on 624 melanoma cell line. Values represent Mean fluorescent intensity (MFI) ratio vs isotype control. (B-C) Representative experiment showing IFNγ (B) and TNF (C) secretion by TILs upon co-cultured with melanoma cells 624 at 1:3 E:T for 18 hr in the presence of isotype control, anti-TIGIT (30 μg/ml) or anti-PVRIG Abs (10 ug/ml) as mono treatment (blue histograms) or in combination with anti-TIGIT (green histograms). Percentage of Ab mono treatment effect was compared to isotype control treatment mIgG1 and the percentage of Ab combo-treatment effect was compared to anti-TIGIT mono-treatment.

[0061] FIG. 32A-32H. TILs (209-gp100/463-F4-gp100) were co-cultured with melanoma cells 624 in 1:3 E:T for 18 hr in the presence of anti PVRIG Abs CHA.7.518.1.H4(S241P) or CHA.7.538 with or without anti-TIGIT (aTIGIT) combo and tested for cytokine secretion. Percentage of Ab treatment effect was compared to isotype control treatment and the mean of 5 experiments (F4) or 6 experiments (209) were plotted. Paired, two tailed T test was calculated for each treatment compared to isotype or in combos—compared to anti-TIGIT alone, p values are indicated.

[0062] FIGS. 33A and 33B. (A) Humanized PVRIG antibody, CHA.7.518.1.H4(S241P), and an anti-TIGIT antibody increase CD4+ T cell proliferation compared to single antibody treatments. Representative data (n≥2) shows the percentage of CFSE low, proliferating CD4+ T cells (mean plus standard deviation) from a single human CD3+ T cell donor (Donor 143) when co-cultured with the CHO-S OKT3 hPVRL2 cells. The dashed line indicates the baseline percentage of CFSE low, CD4+ T cells proliferating after treatment with the human IgG4 isotype control antibody. (B) Humanized PVRIG antibody, CHA.7.518.1.H4(S241P), and the anti-TIGIT antibody increase CD4+ T cell proliferation compared to single antibody treatments. Representative data (n≥2) shows the percentage of CFSE low, proliferating CD4+ T cells (mean plus standard deviation) from a single human CD4+ T cell donor (Donor 201) when co-cultured with the CHO-S OKT3 hPVRL2 cells. The dashed line indicates the baseline percentage of CFSE low, CD4+ T cells proliferating after treatment with the human IgG4 isotype control antibody. The numbers refer to the percent increase or decrease in proliferation of the anti-PVRIG or anti-DNAM-1 antibody treatments, respectively, compared to the relevant isotype control antibodies.

[0063] FIGS. 34A and 34B. (A): The combination of the humanized PVRIG antibody, CHA.7.518.1.H4(S241P), and the anti-TIGIT antibody increases CD8+ T cell proliferation. Representative data (n≥2) shows the percentage of CFSE low, proliferating CD8+ T cells (mean plus standard deviation) from a representative human CD8+ T cell donor (Donor 232) when co-cultured with the CHO-S OKT3 hPVRL2 cells. The dashed line indicates the baseline percentage of CFSE low, CD8+ T cells proliferating after treatment with the human IgG4 isotype antibody. The numbers refer to the percent increase or decrease in proliferation of the anti-PVRIG or anti-DNAM-1 antibody treatments, respectively, compared to the relevant isotype control antibodies. (B) The combination of the humanized PVRIG antibody, CHA.7.518.1.H4(S241P), and the anti-TIGIT antibody increases IFNγ secretion from CD8+ T cells. Representative data (n≥2) shows the pg/ml of IFNγ produced (mean plus standard deviation) by a representative human CD8+ T cell donor (Donor 232) when co-cultured with the CHO-S OKT3 hPVRL2 cells. The dashed line indicates the baseline IFNγ production following treatment with the human IgG4 isotype antibody. The numbers refer to the percent increase or decrease in IFNγ secretion of the anti-PVRIG or anti-DNAM-1 antibody treatments, respectively, compared to the relevant isotype control antibodies.

[0064] FIG. 35 depicts the design of the experimental system of Example 2(3).

[0065] FIG. 36A-36C. shows a histogram depicting levels of PVRIG (using Anti-Human PVRIG CHA.7.538.AF647), TIGIT (using Anti-Human TIGIT Cat. 17-9500-41 eBioscience) and DNAM-1 (using Anti-human CD226-APC Cat. 338312 biolegend) expression in TILs. Fold of expression is compared to isotype (Iso) control.

[0066] FIG. 37. Summarized plot of the effect of anti PVRIG antibodies on the secretion of IFNγ from TILs. TILs were co-cultured with CHO-S HLA-A2/B2M cells over-expressing PVRL2 in E:T ratio of 1:3 for 18 hr in the presence of anti PVRIG antibodies (c518, c538 and 544) or with anti TIGIT antibody. Each dot represents an average of data of IFNγ secretion from the same TIL from different experiments. The percentage indicated is the different between each antibody treatment compared to isotype control. Paired, two tailed T-test was calculated for each treatment compared to 544 or in combos, compared to anti TIGIT alone, p values are indicated. Number of experiments preformed per each TILs; 209(N=3), F4 (N=2), F5(N=3) and MART1(N=2).

[0067] FIGS. 38A and 38B. Summarized plot of the effect of c518 and c538 dose response on the secretion of TNF-α from TILs. TILs were co-cultured with CHO-S HLA-A2/B2M cells over-expressing PVRL2 in effector-to-target ratio of 1:3 for 18 hr in the presence of anti PVRIG antibodies (c518, c538 or isotype control) as described in Example 2(3).

[0068] FIG. 39A-39C. TILs were co-cultured with CHO-S HLA-A2/B2M target cells over-expressing PVRL2 in E:T ration of 1:3 for 18 hr in the presence of anti PVRIG antibodies (c518, c538 and 544) or with anti TIGIT antibody. The percentage indicated in the above tables is the difference in the effect of cytokine secretion from TILs of each antibody treatment compared to its isotype control. The first experiment is represented in Figure A and B, and the second experiment in Figure C.

[0069] FIGS. 40A and 40B. CHO-S OKT3 co-culture assay design. CFSE labeled CD3+ T cells were co-cultured with CHO-S-OKT3-PVRL2 or mock transfected cells for 5 d. The effect anti-PVRIG Abs on T cell proliferation and cytokine secretion was analyzed.

[0070] FIGS. 41A and 41B. Effect of anti-PVRIG antibodies on IFNγ secretion upon CHO-OKT3 PVRL2 cells in responder vs. non-responder donor. CD3+ cells from 2 different donors were co-cultured with CHO-S-PVRL2 cells in 5:1 E:T for 5 d in the presence of anti PVRIG Abs and tested for cytokine secretion and T cells proliferation. (A) ‘responder donor’ in which we observed an effect to anti PVRIG Abs. (B) ‘non-responder donor’ in which we do not observed effects to Abs treatment.

[0071] FIGS. 42A and 42B. Effect of anti-PVRIG antibodies on CD4 and CD8 proliferation from responder donor. CFSE labeled CD3+ T cells were co-cultured with CHO-S-PVRL2 cells in 5:1 E:T for 5 d in the presence of anti PVRIG Abs or anti-TIGIT Abs. The effect on T cells proliferation gating on CD4 or CD8 was evaluated by flow cytometry. Percentage of proliferating cells (CFSE low) (A) or total cells number (B) of CD4+CFSElow or CD8+CFSE low are presented.

[0072] FIG. 43A-43C. Shows the effect of anti-PVRIG antibodies on IFNγ secretion or CD8 proliferation from responder donor. CD3+ cells were co-cultured with CHO-S-PVRL2 cells in 5:1 E:T for 5 d in the presence of anti PVRIG Abs and tested for (A) cytokine secretion and (B) T cells proliferation. Percentage of Ab treatment effect was compared to isotype control treatment and the mean of 5 ‘responders’ donors (responders) is presented. (C) IFNγ secretion levels from the same 5 donors upon co-culture with CHOS-OKT3 PVRL2 as described in section A and B upon treatment with isotype vs. anti-PVRIG Abs. p value represent ratio paired T test.

[0073] FIG. 44 is a summary table of Abs treatment effect across donors tested (n=10). Percentages indicated represent the effect of Ab treatment on a specific readout (indicated in columns titles) as compared to the relevant isotype control. ‘responder’ donors (donors #3, 72,226,345 and ES_001) considered as ‘responder’ which some anti-PVRIG Abs (mainly CHA.7.518) enhanced IFNγ or proliferation vs. isotype controls.

[0074] FIG. 45A-45C depict the results of experiments with several antibodies. The affinities (nM) are shown in A, with the HEK hPVRIG cells being HEK cells transformed with hPVRIG as discussed herein and Jurkat cells expressing endogeneous hPVRIG. (B) depicts the gMFI using 4 different antibodies against Donor 1 primary CD8 T cells and (C) being Donor 2 primary CD8 T cells.

[0075] FIGS. 46A and 46B depict interactions of TIGIT with CHO cells. (A) Human TIGIT Fc protein binds to CHO cells. Graded concentrations of human TIGIT Fc and synagis IgG1 control were assessed for their ability to bind to CHO cells in a FACS-based binding assay. (B) Human PVR is expressed on activated CD4 T cells. CD4 T cells were co-cultured with CHO cells expressing the scFv of the OKT3 antibody and activated for 5 days. On day 5, CD4 T cells were analysed for expression of PVR and dilution of CFSE.

[0076] FIG. 47A-47C depict antitumor responses of anti-mPVRIg and anti-PDL-1 antibodies in CT26 tumor model. A-B. Groups of 10 BALB/c mice were subcutaneously injected with 5×10⁵ CT26 cells. After tumors were measured on day 4, mice were randomized (40 mm3 mean tumor volume per group) and then treated with the designated mAb (100 or 200 μg/dose IP) followed by additional doses on days 7, 11, 14, 18 and 21. A. Groups were treated with 6 doses of single agents. Anti-PDL-1 vs control ***p<0.0001. Tumor volumes are represented as the Mean volume+SEM. B. Tumor volumes were measured twice weekly. The number of tumor-free (TF) mice per group is indicated. C. survival proportions of assigned groups; Anti-PDL-1 vs control **p=0.005.

[0077] FIG. 48A-48C depict antitumor responses of anti-PVRIG and anti-PDL-1 antibodies combination in CT26 tumor model. A-B. Groups of 10 BALB/c mice were subcutaneously injected with 5×10⁵ CT26 cells. After tumors were measured on day 7, mice were randomized (75 mm³ mean tumor volume per group) and then treated with the designated mAb (300 μg/dose IP) followed by additional doses on days 11, 14, 18, 21 and 25. A. Groups were treated with 6 doses of combined agents. Anti-PDL-1+Ab 407 vs control p=0.0005; anti-PDL-1 and mAb 406 vs control p=0.056. B. Tumor volumes were measured ×3 weekly. The number of tumor-free (TF) mice per group is indicated. C. survival proportions of assigned groups; Anti-PDL-1′mAb 407 vs control p=0.0088.

[0078] FIG. 49A-49D depict the amino acid sequences and the nucleic acid sequence for the variable heavy chain (A and B, respectfully) and the amino acid sequences and the nucleic acid sequence for the variable light chain (C and D, respectfully) for AB-407 (BOJ-5G4-F4).

[0079] FIGS. 50A and 50B depicts the amino acid sequences of the constant domains of human IgG1 (with some useful amino acid substitutions), IgG2, IgG3, IgG4, IgG4 with a hinge variant that finds particular use in the present invention, and the constant domains of the kappa and lambda light chains.

[0080] FIG. 51 depicts the sequences of human and cynomolgus macaque (referred to as cyno) TIGIT ECD and of the human PVR ECD proteins.

[0081] FIG. 52. Shows the flow cytometry binding summary for anti-TIGIT fabs. All unique ELISA positive fabs were analyzed by flow cytometry. The mean fluorescence intensity (MFI) was measured for the human or cyno TIGIT over-expressing Expi293 cells as well as the parental Expi293 cells. The MFI ratio for the target-specific vs off-target binding was calculated. Data for selected clones is shown.

[0082] FIG. 53A-53C depict the sequences of anti-TIGIT antibodies. Unless otherwise noted, the CDRs utilize the IMGT numbering (including the antibodies of the sequence listing.

[0083] FIG. 54. Shows the FACS KD results of anti-TIGIT mAbs binding to Expi293 human TIGIT over-expressing cells as described in Example 12.

[0084] FIG. 55. Shows the FACS KD results of mAbs binding to Expi293 cyno TIGIT over-expressing cells.

[0085] FIG. 56. Shows the results from Example 14, showing the resulting kinetic rate constants and the equilibrium dissociation constants where data were reliable enough to estimate the binding constants.

[0086] FIGS. 57A and 57B show the results of human PVR-Fc variant binding to Expi293 human TIGIT over-expressing cells in Example 4. Figure A (left): Binding curve generated for human PVR-m2aFc construct titrated with Expi293 human TIGT over-expressing cells. The KD and 95% confidence interval are shown. Figure B (right): Binding curve generated for human PVR-h1Fc construct titrated with Expi293 human TIGT over-expressing cells. The KD and 95% confidence interval are shown.

[0087] FIG. 58. Shows a table of phage antibodies inhibiting human PVR-m2aFc binding to human TIGIT over-expressed on Expi293 cells. mAbs were tested against known blocking (BM26) benchmark antibody, and human IgG4 isotype control (Synagis) antibody. A “Yes” indicates the mAb inhibited hPVR analogous to BM26.

[0088] FIG. 59. Shows a table of IC50 values of anti-TIGIT hybridoma antibodies inhibiting binding of human PVR-h1Fc to human TIGIT over-expressed on Expi293 cells. Values are representative of one of two independent experiments. The IC50 results for the two independently performed experiments showed a range of only 1.2-2-fold differences.

[0089] FIG. 60. Shows the results of Example 6, that the phage-derived and BM anti-human TIGIT antibodies, CPA.9.027, CPA.9.049, CPA.9.059, BM26, and BM29 increase IL-2 signaling. BM26 and BM29 are both the human IgG4 (hIgG4 with a S241P variant) isotype. Representative data (n≥2) shows the RLU (mean+/−standard deviation) of the luciferase signal from a 6 hour co-culture of Jurkat IL-2-RE luciferase human TIGIT cells and aAPC CHO-K1 human PVR cells. The concentration of each antibody was 10 μg/ml.

[0090] FIG. 61. Shows additional results of Example 6, that the phage-derived and BM hIgG4 anti-human TIGIT antibodies, CPA.9.027, CPA.9.049, CPA.9.059, BM26, and BM29 increase IL-2 signaling in a dose-dependent manner. BM26 and BM29 are both the hIgG4 isotype. Representative data (n≥2) shows the RLU (mean+/−standard deviation) of the luciferase signal from a 6 hour co-culture of Jurkat IL-2-RE luciferase human TIGIT cells and aAPC CHO-K1 human PVR cells. A 10 point, 2-fold dilution series starting at 20 μg/ml was used for each antibody.

[0091] FIG. 62. Shows the results of Example 6, that the hybridoma-derived and BM anti-human TIGIT antibodies, CHA.9.536, CHA.9.541, CHA.9.546, CHA.9.547, CHA.9.560, BM26, and BM29 increase IL-2 signaling. BM26 and BM29 are both the mIgG1 isotype. The non-blocking anti-human TIGIT antibody, CHA.9.543 does not enhance IL-2 signaling. Representative data (n≥2) shows the RLU (mean+/−standard deviation) of the luciferase signal from a 6-hour co-culture of Jurkat IL-2-RE luciferase human TIGIT cells and aAPC CHO-K1 human PVR cells. The concentration of each antibody was 10 μg/ml.

[0092] FIG. 63. Shows the results of Example 6, that the hybridoma-derived and benchmark mIgG1 anti-human TIGIT antibodies, CHA.9.536, CHA.9.541, CHA.9.546, CHA.9.547, CHA.9.560, and BM26 increase IL-2 signaling in a dose-dependent manner. BM26 is the mIgG1 isotype. Representative data (n≥2) shows the RLU (mean+/−standard deviation) of the luciferase signal from a 6 hour co-culture of Jurkat IL-2-RE luciferase human TIGIT cells and aAPC CHO-K1 human PVR cells. A 10 point, 2-fold dilution series starting at 20 μg/ml was used for each antibody.

[0093] FIG. 64. Shows that the phage, hybridoma and BM anti-human TIGIT antibodies, CPA.9.027, CPA.9.049, CPA.9.059, CHA.9.536, CHA.9.541, CHA.9.546, CHA.9.547, CHA.9.560, BM26, and BM29 increase antigen-specific IFNγ signaling. BM26 is tested as both the hIgG4 and mIgG1 isotypes, while BM29 is only tested as the hIgG4 isotype. Representative data (n=2) shows the amount of IFNγ (mean+/−standard deviation) in the culture supernatant after 24-hour co-culture of CMV-specific CD8⁺ T cells with the Mel624 human PVR cells. The concentration of each antibody was 10 μg/ml. The Mel624 human PVR used in the assay were pulsed with 0.0033 μg/ml or 0.001 μg/ml peptide.

[0094] FIG. 65. Shows that the phage, hybridoma and BM anti-human TIGIT antibodies, CPA.9.027, CPA.9.049, CPA.9.059, CHA.9.536, CHA.9.541, CHA.9.546, CHA.9.547, and CHA.9.560, as well as BM26, increase antigen-specific IFNγ signaling either alone (open bars) or in combination with an anti-PVRIG antibody, CHA.7.518.1.H4(S241P) (hatched bars). BM26 is the mIgG1 isotype. For the isotype antibody control treatments, the open bar refers to the isotype antibody alone, and the hatched bar refers to isotype antibody in combination with CHA.7.518.1.H4(S241P). Representative data (n=2) shows the amount of IFNγ (mean+/−standard deviation) in the culture supernatant after a 24 hour co-culture of CMV-specific CD8+ T cells with Mel624 cells over-expressing human PVR and human PVRL2. The concentration of each antibody was 10 μg/ml. The Mel624 human PVR/human PVRL2 cells used in the assay were pulsed with 0.0033 μg/ml or 0.001 μg/ml peptide.

[0095] FIG. 66. Shows the percent increase of IFNγ secretion with anti-human TIGIT antibodies, CHA.7.518.1.H4(S241P), and the combination of anti-human TIGIT antibodies and CHA.7.518.1.H4(S241P), over the respective isotype control antibodies.

[0096] FIG. 67 is the dendrogram for the epitope binning experiments of Example 7.

[0097] FIG. 68 is the grouping of the antibodies from the epitope binning experiments of Example 7.

[0098] FIG. 69. Shows the high affinity binding to human TIGIT overexpressing cells in a dose titration of the affinity matured phage antibodies (CPA.9.083, CPA.9.086), humanized hybridoma antibodies (CHA.9.547.7, CHA.9.547.13), benchmark antibodies (BM26, BM29), and the hIgG4 isotype control (anti-Synagis) on human TIGIT over-expressing Expi293 cells, as described in experiments of Example 3. All antibodies were titrated using a serial 2-fold dilution over 11 points starting at 10 μg/ml (133.33 nM [binding site]). AF647-labeled goat anti-human F(ab′) (Jackson Immunoresearch) was added to the cells to detect binding of anti-TIGIT antibodies. The gMFI of the anti-TIGIT antibodies bound to the human TIGIT over-expressing Expi293 cells (black line), and the parental Expi293 cells (grey line) are shown. KD values+/−95% CI, and curve fits are indicated below each graph.

[0099] FIG. 70. Shows that anti-TIGIT antibodies are cross reactive to cyno TIGIT in a dose titration of the affinity matured phage antibodies (CPA.9.083, CPA.9.086), humanized hybridoma antibodies (CHA.9.547.7, CHA.9.547.13), benchmark antibodies (BM26, BM29), and the hIgG4 isotype control (anti-Synagis) on cyno TIGIT over-expressing Expi293 cells, as described in experiments of Example 3. All antibodies were titrated using a serial 2-fold dilution over 11 points starting at 10 μg/ml (133.33 nM [binding site]). AF647-labeled goat anti-human F(ab′) (Jackson Immunoresearch) was added to the cells to detect binding of anti-TIGIT antibodies. The gMFI of the anti-TIGIT antibodies bound to the cyno TIGIT over-expressing Expi293 cells (black line), and the parental Expi293 cells (grey line) are shown. KD values+/−95% CI, and curve fits are indicated below each graph.

[0100] FIGS. 71A and 71B. Shows that affinity matured phage antibodies are cross reactive to mouse TIGIT in a dose titration of the affinity matured phage antibodies reformatted as mouse IgG1 (mIgG1) (CPA.9.083, CPA.9.086), benchmark anti-mouse TIGIT antibodies (BM27 mIgG1, BM30 mIgG1), and the mIgG1 isotype control (anti-Synagis) are shown, as described in experiments of Example 3. A) The gMFI of the anti-TIGIT antibodies bound to the mouse TIGIT over-expressing HEK cells (black line), and the parental HEK cells (grey line). B) The gMFI of the anti-TIGIT antibodies (black line) or Synagis mIgG1 (grey line) bound to regulatory CD4+CD25+Foxp3+ T cells isolated from s.c. implanted Renca tumors in Balb/c mice. Anti-TIGIT antibodies were titrated using either a serial 2- or 3-fold dilution series starting at 15 μg/ml (200 nM [binding site]), or 10 μg/ml (132 nM [binding site]), respectively. AF647-labeled goat anti-mouse IgG-Fc (Southern Biotech) were added to the cells to detect binding of the anti-TIGIT antibodies on mouse TIGIT over-expressing cells. Anti-TIGIT antibodies were directly conjugated to AF647 for mouse Treg binding. KD values for each anti-TIGIT antibody are indicated.

[0101] FIG. 72. Shows a dose titration of the affinity matured phage antibodies (CPA.9.083, CPA.9.086), humanized hybridoma antibodies (CHA.9.547.7, CHA.9.547.13), and benchmark antibodies (BM26, BM29) on human effector memory CD95+CD28-CD8+CD3+ T cells from 3 healthy donor PBMCs (Donors 321, 322, and 334), as described in experiments of Example 3. PBMCs were surface stained with antibodies against the following lineage markers CD3, CD4, CD8, CD14, CD16, CD28, CD56, and CD95 (BD Biosciences, BioLegend), as well as live/dead fixable aqua dye (Life Technologies). AF647-labeled anti-TIGIT antibodies and hIgG4 isotype control antibody (anti-Synagis) were then titrated using a serial 3-fold dilution over 12 points starting at 30 μg/ml (396 nM [binding site]). The gMFI of the anti-TIGIT antibodies bound to the effector memory T cells are shown. KD values for each antibody across the 3 different donors are reported in the table. The affinity mature phage antibodies (CPA.9.083 and CPA.9.086) had the highest binding affinity to the human effector memory T cells.

[0102] FIG. 73. Shows a dose titration of the affinity matured phage antibodies (CPA.9.083, CPA.9.086, CPA.9.103), humanized hybridoma antibody (CHA.9.547.1), and benchmark antibody (BM26) on cyno effector memory CD95⁺CD28⁻CD8⁺CD3⁺ T cells from PBMCs isolated from 2 naïve cyno monkeys (BioreclamationIVT), as described in experiments of Example 3. PBMCs were surface stained with antibodies against the following lineage markers CD3, CD4, CD8, CD14, CD16, CD28, CD56, and CD95 (BD Biosciences, BioLegend), as well as live/dead fixable aqua dye (Life Technologies). AF647-labeled anti-TIGIT antibodies and hIgG4 isotype control antibody (anti-Synagis) were then titrated using a serial 3-fold dilution over 12 points starting at 30 μg/ml (396 nM [binding site]). The gMFI of the anti-TIGIT antibodies bound to the effector memory T cells are shown with the gMFI of the anti-Synagis hIgG4 isotype control antibody subtracted. K_{D} values for each antibody across the 2 donors are reported in the table. The affinity mature phage antibodies (CPA.9.083 and CPA.9.086) had the highest binding affinity to the cyno effector memory T cells.

[0103] FIG. 74. Shows the SPR kinetics of anti-TIGIT antibody binding to human, cyno and mouse TIGIT, as described in experiments of Example 5. The kinetic rate and equilibrium dissociation constants for the affinity matured phage antibodies (CPA.9.083, CPA.9.086, CPA.9.103), humanized hybridoma antibodies (CHA.9.547.1 and CHA.9.547.7), and benchmark antibodies (BM26, BM29) were determined by SPR on the ProteOn instrument.

[0104] FIG. 75. Shows that the anti-TIGIT antibodies block PVR/TIGIT interactions, as described in experiments of Example 4. Human TIGIT over-expressing Expi293 cells were preincubated with either the affinity matured phage antibodies (CPA.9.083, CPA.9.086), humanized hybridoma antibodies (CHA.9.547.7, CHA.9.547.13), benchmark antibodies (BM26, BM29), or the hIgG4 isotype control (anti-Synagis). All antibodies were titrated using a serial 2.5-fold dilution over 11 points starting at 10 μg/ml (133.33 nM [binding site]). Following antibody preincubation, human PVR-m2aFc was added to the cells at 158 nM [binding site] or EC₉₀. AF647-labeled goat anti-mouse IgG-Fc (Southern Biotech) was then added to the cells to detect binding of anti-TIGIT antibodies. The percent inhibition of PVR-m2aFc binding to the human TIGIT over-expressing Expi293 cells is shown for each antibody. IC₅₀ values for each anti-human TIGIT antibody are reported in the table (n=2 experiments).

[0105] FIG. 76. Show the results of Example 6, that the affinity matured phage antibodies (CPA.9.083, CPA.9.086), humanized hybridoma antibodies (CHA.9.547.7, CHA.9.547.13), and benchmark antibody (BM26) increase IL-2 signaling in a dose-dependent manner. Synagis hIgG4 is the isotype control antibody. Representative data (n≥2) shows the RLU (mean+/−standard deviation) of the luciferase signal from a 6-hour co-culture of Jurkat IL-2-RE luciferase human TIGIT cells and CHO-K1 human PVR cells. A 19 point, 1.5-fold dilution series starting at 20 μg/ml was used for each antibody.

[0106] FIG. 77. Shows that anti-TIGIT antibodies induce IFNγ in CMV-specific CD8+ T cells. An in vitro co-culture assay with human CMV-specific CD8+ T cells was utilized to assess the effect of the affinity matured phage antibodies (CPA.9.083, CPA.9.086), humanized hybridoma antibodies (CHA.9.547.7, CHA.9.547.13), and benchmark antibodies (BM26, BM29) on antigen-specific cytokine secretion, as described in experiments of Example 6. The target cell line used in the assay was the HLA-A2+ pancreatic adenocarcinoma cells, Panc.05.04 that endogenously expresses human PVR and PVRL2. Panc.05.04 cells were pulsed with the CMV pp65 peptide at 0.03 μg/ml or 0.01 μg/ml at 37° C. for 1 hour. Cells were then washed and plated at 50,000 cells/well in 96-well round-bottom tissue culture treated plates. Anti-human TIGIT antibodies or the isotype control hIgG4 antibody (anti-Synagis) were added at a concentration of 0.1 μg/ml. Human CMV-specific CD8+ T cells from a single donor were expanded according to the protocol above. 50,000 human CD8+ T cells were added to each well. Co-cultures were incubated at 37° C. with 5% CO2 for 24 hours. The amount of human interferon gamma (IFNγ) in the co-culture supernatant was measured by flow cytometry using a cytometric bead assay (BD Biosciences). The percent increase of IFNγ secretion for each antibody over the hIgG4 isotype is summarized in the table (n=2 experiments).

[0107] FIG. 78. Shows anti-TIGIT antibodies augment IFNγ when combined with a PVRIG antibody, CHA.7.518.1.H4(S241P). An in vitro co-culture assay with human CMV-specific CD8+ T cells was utilized to assess the effect of the affinity matured phage antibodies (CPA.9.083, CPA.9.086), humanized hybridoma antibodies (CHA.9.547.7, CHA.9.547.13), and benchmark antibodies (BM26, BM29) on antigen-specific cytokine secretion in combination with an anti-PVRIG antibody, CHA.7.518.1. The target cell line used in the assay was the HLA-A2+ pancreatic adenocarcinoma cells, Panc.05.04 that endogenously expresses human PVR and PVRL2. Panc.05.04 cells were pulsed with the CMV pp65 peptide at 0.03 μg/ml or 0.01 μg/ml at 37° C. for 1 hour. Cells were then washed and plated at 50,000 cells/well in 96-well round-bottom tissue culture treated plates. Anti-human TIGIT antibodies or the isotype control hIgG4 antibody (anti-Synagis) were added at a concentration of 0.1 μg/ml in combination with CHA.7.518.1 (hatched bars) or a control hIgG4 isotype antibody at 10 μg/ml (solid bars). Human CMV-specific CD8+ T cells from a single donor were expanded according to the protocol above. 50,000 human CD8+ T cells were added to each well. Co-cultures were incubated at 37° C. with 5% CO2 for 24 hours. The amount of human IFNγ in the co-culture supernatant was measured by flow cytometry using a cytometric bead assay (BD Biosciences). The percent increase of IFNγ secretion for each antibody over the hIgG4 isotype is summarized in the table (n=2 experiments).

[0108] FIG. 79. Shows the correlation analysis of PVRIG and TIGIT expression on CD4+ and CD8+ T cells from dissociated tumors. For each tumor sample, a mean fluorescence intensity ratio (MFIr) was calculated, and a Spearman's correlation analysis was performed, and an r2 and p value reported.

[0109] FIGS. 80A-80C. Shows the results of tumor growth inhibition and survival in TIGIT KO mice treated with an anti-mouse PVRIG antibody. Groups of 7-10 TIGIT KO and C57BL/6 WT mice were s.c. injected with 1×10⁵ B16/Db-hmgp100 cells. Mice were treated twice per week for 3 weeks, starting at the inoculation day (day 0) with the designated antibody. A) Mean tumor volumes+/−standard error of the mean (SEM) are shown in the upper graph, with *** indicating a p-value <0.001 for TIGIT KO treated with anti-mouse PVRIG antibody (Clone 407) compared to C57BL/6 WT treated with the mIgG1 isotype control antibody. Tumor volumes for individual mice within each antibody treatment group are shown as spider plots in lower graphs. B) Table summarizing the TGI as measured at indicated days compared to control C57BL/6 WT mice treated with the mIgG1 isotype control. C) Survival of mice after s.c. injection of B16/Db-hmgp100 cells.

[0110] FIG. 81 depicts combination treatments with the indicated antibodies as compared to control in Mel-624, Colo205, and Panc.05.04 cells. gp100 or CMVpp65 specific T cells were co-cultured with Mel-624, Colo205, and Panc.05.04 cells, gp100 or CMVpp65 peptide, and the indicated antibodies at 10 mg/ml. IFN-γ concentration in the conditioned media was determined at 24 hrs. Average+Std Dev of triplicates is shown. % change in IFN-γ for each condition relative to hIgG4 is shown.

[0111] FIG. 82A-82C depict expression of PD-1/TIGIT/PVRIG on CD8 T cells and expression of PD-L1, PVR, PVRL2 on Colo205, Panc.05.04 cells. A) Expression of PVRIG, TIGIT, and PD-1 on CMVpp65 reactive T cells expanded with pp65 peptide with IL-2 and IL-7 for 10 days. Expression of PVRIG, TIGIT, and PD-1 on CMVpp65 reactive T cells is shown. B) Expression of PD-L1, PVR, and PVRL2 on Colo205 and Panc.05.04 cells is shown. C) CMVpp65 specific T cells were co-cultured with Colo205 and Panc.05.04 cells, CMVpp65 peptide, and the indicated antibodies at 10 mg/ml. IFN-γ concentration in the conditioned media was determined at 24 hrs. Average+Std Dev of triplicates is shown. % change in IFN-γ for each condition relative to hIgG4 is shown.

[0112] FIG. 83A-83H. PVRIG is expressed highest on cytotoxic lymphocyte subsets from human cancer. A) Expression of PVRIG on leukocyte cell subsets from 5-8 healthy donor PBMCs is shown. PVRIG expression is defined as the ratio of PVRIG MFI relative to isotype control MFI. B) Expression of PVRIG, TIGIT, CD96, and PD-1 on peripheral blood Tregs as compared to CD8 T cell subsets from 5 healthy donor PBMCs is shown. C) CMV pp65 specific T cells from 3 healthy donors were expanded in vitro with pp65 (495-503) peptide, IL-2 and IL-7 for up to 7 days. Expression of TIGIT (blue) and PVRIG (black) on HLA-A2/pp65 (495-503) tetramer positive cells is shown. D) Human T cells were cultured with allogeneic DCs and expression of TIGIT and PVRIG shown on CD4⁺ T cells on day 0, 1, 2, and 7 post activation. E) Representative FACS plots showing expression of PVRIG (blue) compared to isotype control (red) on TILS (CD4 T cells, CD8 T cells, and NK cells) from a representative lung and kidney cancer. F) Co-expression of PVRIG, TIGIT, and PD-1 on CD4 and CD8 TILS from a lung cancer sample is shown. G) Expression of PVRIG on CD8⁺ and CD4⁺ TILS from dissociated human tumors of various cancer types is shown. Each dot represents a distinct tumor from an individual patient. H) Relative expression on CD8 TILs vs Treg TILS for PVRIG, TIGIT, and PD-1 from endometrial, kidney, and lung tumors was assessed. For each tumor, the fold expression on CD8 TILS was normalized to fold expression on Treg TILS and plotted. For A, B, C, G, and H, mean±SEM is shown by the error bars.

[0113] FIG. 84A-84F. PVRL2 expression is enhanced in the tumor microenvironment. A) PVRL2 expression was assessed by IHC on lung, ovarian/endometrial, breast, colon, kidney, and melanoma tumors. Bars depict mean±SEM. For each tumor, 2 cores were assessed by a pathologist and scored based on prevalence and intensity of membranous staining on tumor cells as described in the supplemental methods. For each tumor, the average score of 2 cores is shown. B) A representative melanoma tumor showing PVRL2 expression on tumor cells (arrow) and in the immune cells (*) in the stroma is shown. C) PVRL2 expression on a log2 scale from dissociated tumors determined by FACS on CD45⁻, CD14⁺ TAMs, and Lin⁻CD14⁻CD33^{hi} mDC cell subsets is shown. Mean±SEM is shown for each cancer type. Dotted line represents no staining was observed. For each cell type, at least 100 events were required in order to be analyzed. D) Representative FACS plots for PVRL2 expression (blue) as compared to IgG (red) are shown for a lung cancer. E) For tumor samples where we were able to assess both PVRIG and PVRL2 expression, PVRIG expression on CD8⁺ T cells is plotted versus PVRL2 expression on CD14⁺ TAMS and CD45⁻ cells for each tumor. Each dot represents an individual tumor sample. Red line represents a 2-fold expression of PVRIG or PVRL2 compared to IgG. The Table in FIG. 84F shows the prevalence of PVRL2 in various tumor samples.

[0114] FIG. 85A-85E. Distinct regulation of PVRL2 and PD-L1 on tumor cells. A) Expression of PD-L1 and PVRL2 was assessed by IHC on serial sections. Tumors samples from FIG. 84 A were grouped based on tissue type and expression of PVRL2 on PD-L1 negative and PD-L1 positive is shown. PD-L1 negative tumors were defined as no membranous staining on tumor or immune cells from either duplicate cores for a given tumor. PD-L1 positive staining was defined as membranous staining on at least 1 core of a tumor. Bars depict mean±SEM for each group. B, C) Representative expression of a PVRL2⁺PD-L1⁻ endometrial (B) tumor and a PVRL2⁺PD-L1⁻ lung (C) tumor. D) Immature BM-DCs were cultured with the indicated stimuli and PVR, PVRL2, and PD-L1 expression assessed by FACS on day 2 of culture. For each condition, expression was normalized to media only control condition. E) Expression of PVR, PVRL2, and PD-L1 on HT-29 cells treated with IFN-γ or media alone is shown. PD-L1 or PVRL2 is shown in blue and IgG isotype control staining is shown in red.

[0115] FIG. 86A-86I. CHA.7.518.1.H4(S241P) is a high affinity antibody that enhances T cell activation. A) Binding of CHA.7.518.1.H4(S241P) or IgG isotype control to HEK293 PVRIG or HEK293 parental cells by FACS is shown. FACS KD values are shown for the binding of CHA.7.518.1.H4(S241P) to HEK293 hPVRIG, HEK293 cPVRIG, and Jurkat cells. B) CHA.7.518.1.H4(S241P) disrupts the binding of PVRL2 Fc to HEK293 cells ectopically expressing PVRIG. Mean±Std Dev of triplicate values is shown. C) CHA.7.518.1.H4(S241P) blocks the binding of PVRIG Fc to HEK293 cells that endogenously express PVRL2. D) Human CD4 T cells were co-cultured with aAPC CHO cells expressing a cell surface bound anti-CD3 antibody and hPVRL2 in the presence of 10 μg/ml anti-PVRIG antibody and human IgG isotype control antibodies. The effect of anti-PVRIG Ab on proliferation of CD4 T cells isolated from 11 different donors is shown. Bars depicted mean±SEM. E) gp100 specific T cell lines (TIL-209, TIL-463) were co-cultured with CHO cells engineered to express HLA-A2 and PVRL2 along with 10 μg/ml anti-PVRIG or IgG isotype control antibody. IFN-γ and TNF-α production was tested at 24 hours post co-culture. Mean±Std Dev of triplicate values is shown. Percent change in IFN-γ and TNF-α for each condition relative to isotype control is depicted by the number above each bar F) Expression of PVR, PVRL2, and PD-L1 (red) relative to IgG (blue) on MEL624, Colo205, and Panc.05.04 cells is shown. For the T cells, expression of PVRIG, TIGIT, and PD-1 (red) relative to IgG (blue) on TIL-209 and TIL-463 gp100 specific T cells, and on CMVpp65 specific T cells is shown. To expand CMVpp65 reactive T cells, PBMCs were cultured with pp65 (495-503) peptide, IL-2, and IL-7 for 10 days. Expression of PVRIG, TIGIT, PD-1 is shown on HLA-A2/pp65 tetramer positive cells. G) gp100 specific T cells (TIL-209, TIL-463) expanded from TILS derived from melanoma tumors were co-cultured with MEL624 cells in the presence of 10 μg/ml of the indicated antibodies. IFN-γ concentration in the conditioned media was determined at 24 hrs. H, I) Expanded CMVpp65 specific T cells were co-cultured with Colo205 and Panc.05.04 cells, CMVpp65 peptide, and the indicated antibodies at 10 μg/ml. IFN-γ concentration in the conditioned media was determined at 24 hrs. For E, G, H, I, average±Std Dev of triplicates is shown. Percent change in IFN-γ for each condition relative to isotype control is depicted by the number above each bar.

[0116] FIG. 87A-87E. PVRIG deficient mice have increased T cell function. A) RNA expression of PVRIG as measured by qRT-PCR from purified mouse immune cell subsets was assessed. Relative expression to housekeeping was determined by @Ct method. B) pmel CD8⁺ TCR transgenic T cells were activated with gp100 (25-33) and PVRIG and TIGIT RNA transcript levels assessed by qRT-PCR at the indicated time points. Graph shows mean±SEM of results from 5 different experiments. C) Spleens were harvested from PVRIG^{-/-} and WT littermates and analyzed by flow cytometry for expression of PVRIG on NK, CD4⁺ and CD8⁺ T cells (“Resting” cells). In addition, CD3⁺ T cells were isolated from splenocytes and activated for 11 days with anti-CD3/anti-CD28 beads. Following the activation, PVRIG expression on CD4⁺ and CD8⁺ T cells (“activated” cells) was analyzed by flow cytometry. Each dot represents cells derived from an individual mouse. D) WT and PVRIG^{-/-} derived splenocytes were labeled with Cell Proliferation Dye eFluor450 and were cultured in the presence of Control-Fc (mouse IgG2a) or with mouse PVRL2 Fc. After 4 d of culture, cell division was analyzed by flow cytometry. Representative FACS plots from an experiment (left) and the summary of percentage inhibition by PVRL2 Fc (defined as % proliferation Control-Fc subtracted from % proliferation PVRL2 Fc) 3 independent experiments (right) are presented. * indicate p-value<0.05, paired student's t-test for the change in proliferation in the presence of PVRL2-FC relative to proliferation in the presence of protein control in WT versus PVRIG^{-/-} T cells. E) pmel CD8⁺ T cells derived from pmel PVRIG^{-/-} or pmel PVRIG WT mice were activated for 11 days with their cognate peptide and IL2. Activated pmel CD8⁺ cells were then co-cultured with B16-Db/gp100 cells for 18 hours and following the co-culture were evaluated for CD107 expression and for cytokine production. Four independent experiments are presented as indicated by each paired dot. * indicate p-value<0.05, Student's t-test comparing PVRIG^{-/-} versus WT.

[0117] FIG. 88A-88H. PVRIG deficiency results in reduced tumor growth and increased CD8+ effector T cell mechanism. A) C57BL/6 WT or PVRIG^{-/-} mice were subcutaneously injected with 5×10⁵ MC38 cells. Tumor volumes were measured ×2 weekly. n=10 mice per group, Ave±SEM is shown, * Indicate p-value<0.05 by Student's unpaired t-test for WT mice versus PVRIG^{-/-} mice (ANOVA). B) Individual tumor growth curves are shown. n=10 mice per group, one representative experiment is shown (n=2). C) C57BL/6 WT or PVRIG^{-/-} mice were subcutaneously injected with 5×10⁵ MC38 cells. At day 14 post-inoculation, mice were treated with anti-PD-L1, ×2 weekly for 2 weeks. Tumor volumes were measured ×2 weekly. n=10 mice per group, Ave±SEM is shown, p-value=0.052 by Student's unpaired t-test for WT mice versus PVRIG^{-/-} mice, both treated with anti-PD-L1. D) Individual tumor growth curves are shown. One representative experiment is shown (n=2). E-H) In separate duplicate experiments, tumors were harvested on day 18 after mice had received 2 doses of anti-PD-L1 or the relevant isotype control. Dissociated tumors were enriched for CD45⁺ cells prior to stimulation for 4 hours with PMA and Ionomycin in the presence of Brefeldin A. Graphs illustrate the total numbers per mg tumor tissue of CD45⁺ immune cells, CD8⁺ T cells and Interferon-γ-producing CD8⁺ T cells from isotype-treated wild-type and PVRIG^{-/-} mice (E) and from anti-PD-L1-treated wild-type and PVRIG^{-/-} mice (F). G-H) Frequency of CD8⁺ IFN-γ⁺ TNF-α⁺ effector cells in tumor-draining lymph nodes from isotype- and anti-PD-L1-treated PVRIG^{-/-} mice, relative to their corresponding wild-type cohort is shown. For E-H, Ave±SEM is shown and p values from a Student's unpaired t-test is shown.

[0118] FIG. 89A-89F. Antagonistic anti-PVRIG antibodies synergistically inhibit tumor grown in combination of PD-1 inhibitors or TIGIT genetic deficiency. A) Binding of mPVRL2 Fc fusion protein to mPVRIG HEK293 engineered cells that were pre-incubated with serial dilutions of anti-mPVRIG mAb or IgG isotype control Ab is shown. B) BALB/c mice were subcutaneously injected with 5×10⁵ CT26 cells. On day 14 post inoculation, mice were sacrificed and spleen, draining lymph nodes and tumors were harvested. Cells were analyzed by flow cytometry for expression of PVRIG on CD3⁺CD4⁺ T cells, CD3⁺CD8⁺ T cells, CD3⁻CD49b⁺ NK cells, CD11b⁺ Gr-1⁺ Myeloid-Derived-Suppressor Cells (MDSC) and CD11b⁺F4/80⁺ macrophages. C, D) BALB/c mice were subcutaneously injected with 5×10⁵ CT26 cells. At day 7 post inoculation mice were treated with anti-PD-L1 and/or anti-PVRIG Ab, 2× weekly for 3 weeks (arrows indicate Ab treatment). C) Tumor volumes are shown. *** indicate p-value<0.001 (ANOVA) for aPD-L1+Rat IgG2b compared to αPD-L1+αPVRIG treated groups. Arrows indicate when antibodies were dosed. D. Survival analysis of complete responder's mice. * indicate p value<0.05 (Log-rank test) for αPD-L1+Rat IgG2b compared to αPD-L1+αPVRIG treated groups. One representative study of 3 studies are shown. E. C57BL/6 or TIGIT mice were subcutaneously injected with 1×10⁵ B16/Db-hmgp100 cells. Mice were treated 2× weekly for 3 weeks with the designated mAb starting on the day of inoculation (day 0). E. Tumor volumes were measured 2× weekly and average±SEM is shown. Tumor growth inhibition as measured at indicated days compared to control WT+mIgG1 isotype control. *** indicate p-value<0.001 for TIGIT^{-/-}+αPVRIG compared to WT+mIgG1 isotype control. Arrows indicate when antibodies were dosed. F. Individual tumor growth curves for each mouse is shown. One representative experiment out of 2 performed is shown.

[0119] FIG. 90A-90F. PVRIG is expressed on T and NK cells of TILS in human cancer. A) Expression of PVRIG, TIGIT, CD96, and PD-1 on CD4 T cell subsets from healthy donor PBMCs is shown. Mean±SEM is shown. B) Human T cells were co-cultured with allogeneic PBMCs and expression of PVRIG protein on CD4 and CD8 T cells shown (top). C) Tumors were dissociated and single cells were activated with anti-CD3 and anti-CD28. Expression of PVRIG (blue) relative to IgG isotype control (red) was assessed on day 0 (directly ex vivo) and day 5 post activation. D) Expression of PVRIG on NK cells from dissociated human tumors is shown. Each dot represents a distinct tumor from an individual patient. Mean±95% confidence internal is shown. D) Dissociated tumor cells were activated with anti-CD3 and anti-CD28 beads for 5 days. Expression of PVRIG (blue) relative to IgG control (red) on CD4 and CD8 T cells on day 0 directly ex vivo and on day 5 post activation is shown for 2 dissociated tumor samples. E) Expression of PVRIG was assessed on CD4 and CD8 T cells from dissociated tumors and from dissociated donor-matched normal adjacent tissue. Each line represents matched tissues obtained from an individual patient. A paired student's t-test was performed. F) A correlation analysis of the magnitude of PVRIG, TIGIT, and PD-1fold expression relative to IgG isotype control on CD4 and CD8 T cells from tumors is shown. Each dot represents an individual tumor sample. A Spearman's correlation coefficient and p value are shown.

[0120] FIG. 91. Expression of PVRL2 is enhanced in colon, skin, and breast cancers. A) Photomicrographs showing the binding of Sigma anti human PVRL2 antibody to FFPE sections of positive cells, CHO-S human PVRL2 (right) compare to negative cells, CHO-S (left), following antigen retrieval at pH9. B) Anti-PVRL2 antibody was tested on a panel of PVRL2⁺ (HT29, MCF7, PC3, PANC1, RT4, NCI-H1573) and PVRL2⁻ (Jurkat, OPM2, Daudi, CA46) cell lines. C-F) Example expression of PVRL2 in lung normal and cancer tissues. C) Normal tissue showing no staining. D) Lung Adenocarcinoma showing partial positive staining. E) Lung adenocarcinoma showing positive staining. F) Lung adenocarcinoma showing strong positive staining.

[0121] FIG. 92. PVRL2 is upregulated on TAMs and CD45⁻ cells in the tumor as compared to normal adjacent tissue. Expression of PVRL2 on CD45⁻ cells and TAMs from donor matched tumor and normal adjacent tissue is shown. A paired student's t-test p value is shown.

[0122] FIGS. 93A and 93B. PVRIG and PVRL2 are co-expressed in the same tumor sample. PVRIG expression on CD4 T cells (A) and NK cells (B) is plotted against PVRL2 expression on TAMS for an individual tumor.

[0123] FIG. 94A-94D. Activity of CHA.7.518.1.H4(S241P) on human T cells. A) Expression of PVRIG on CD4 T cells activated with CHO cells expressing cell surface bound anti-CD3 and PVRL2. B) Expression of HLA-A2, B-2m, and PVRL2 are shown on CHO-S parental and engineered CHO-S cell lines. Fold expression relative to isotype is depicted by the number. C) CHO cells ectopically expressing cell surface bound anti-CD3 and PVRL2 were co-cultured with purified CD8 T cells in the presence of varying concentrations of anti-PVRIG Ab or relevant IgG control. % Proliferation is shown. Each dot represents an average of triplicate values. D) CHO cells ectopically expression HLA-A2/B2m and PVRL2 were co-cultured with 2 gp100 specific T cell lines (TIL F4, TIL 209) in the presence of 1 ug/ml gp100 and varying concentrations of anti-PVRIG antibody or relevant IgG control. TNF-α concentrations on day 3 of co-culture is down. Each value represents an average of triplicates.

[0124] FIG. 95A-95J. Characterization of mPVRIG binding interactions and a surrogate anti-mPVRIG antibody. A, B) Binding of mPVRIG to mPVRL2 was assessed by surface plasmon resonance. C) Soluble receptor Fc or control proteins were incubated in a dose response with immobilized mPVRL2 HIS in an ELISA format. Bound receptor Fc is shown. D) Soluble PVRL2 HIS protein was incubated in a dose response with PVRIG Fc or DNAM Fc coated plates. E) Binding of mPVRIG Fc or control Fc fusion protein to B16-F10 cell line transfected with mPVRL2 siRNA, mPVRsRNA, or scrambled siRNA transfection is shown. F) Affinity characterization of rat anti-mouse PVRIG mAb was performed by examining the binding of anti-mPVRIG to HEK293 cells overexpressing mPVRIG. G) Affinity characterization of rat anti-mouse PVRIG mAb was performed by examining the of anti-mPVRIG to D10.G4.1 cell line endogenously expressing mPVRIG vs isotype control rat IgG is shown. H) Binding of anti-mPVRIG to D10.G4.1 cells transfected with mouse PVRIG-siRNA (green histogram) vs scr siRNA (orange histogram). I) Binding of mPVRIG Fc pre-incubated with anti-mPVRIG Ab to B16-F10 cells, which endogenously express PVRL2

[0125] FIG. 96. Generation of transgenic PVRIG and TIGIT knockout mice. The PVRIG conditional knockout and Tigit knockout mouse lines were generated by Ozgene Pty Ltd (Bentley WA, Australia). A) The targeting construct in which PVRIG exons 1 to 4 were floxed was electroporated into a C57BL/6 ES cell line, Bruce4 (Koentgen et al., Int Immunol 5: 957-964, 1993). B) The targeting construct in which the coding region of Tigit exon 1 (including the ATG) and exons 2 and 3 were replaced with an FRT-flanked neo cassette was electroporated into a C57BL/6 ES cell line, Bruce4. Homologous recombinant ES cell clones were identified by Southern hybridization and injected into goGermline blastocysts (Koentgen et al., genesis 54: 326-333, 2016). Male chimeric mice were obtained and crossed to C57BL/6J females to establish heterozygous germline offspring on C57BL/6 background. The germline mice were crossed to a ubiquitous FLP C57BL/6 mouse line to remove the FRT flanked selectable marker cassette and generate the conditional or knockout alleles (for PVRIG and Tigit, respectively). For PVRIG knockout, mice were further crossed to a ubiquitous Cre C57BL/6 mouse line to remove the loxP flanked exons and generate the knockout allele.

[0126] FIG. 97A-97I. PVRIG knockout mice are immune-phenotypically similar to wild-type mice. Mice (n=5 per wild-type and PVRIG knockout cohorts) were euthanized prior to venous blood being collected in anti-coagulant-coated tubes and harvesting of organs. Single cells were recovered from freshly harvested bone marrow, thymus, spleen, cutaneous and mesenteric lymph nodes. Cells were stained with fluorochrome-conjugated surface marker antibodies and acquired on a BD LSR Fortessa flow cytometer. Panels illustrate comparable frequencies of myeloid cells (A), dendritic cells (B), B cells (C), T cells (D), CD4 T cells (E), CD8 T cells (F), and NK cells (G) across lymphoid tissue types. (H-I) Whole venous blood was run on a Hemavet 950 veterinary hematology system to compare differential counts and frequencies of blood cell subsets from wild-type and PVRIG deficient mice.

[0127] FIG. 98A-98I. Increased T cell effector function in PVRIG^{-/-} mice treated with anti-PDL1 compared to WT with anti-PD-L1. MC38 tumors were inoculated into WT or PVRIG^{-/-} mice and were subsequently treated with anti-PD-L1 or rat IgG2b isotype control. On day 18, CD45+ tumor infiltrating lymphocytes were purified from tumors, RNA extracted, and transcript profiling performed. Several T cell related genes are shown, with each dot representing an individual mouse. Student's t test p values are shown.

[0128] FIG. 99. Anti-TIGIT and anti-PVRIG antibodies induce tumor cell killing. An in vitro co-culture assay with human CMV-specific CD8+ T cells expanded was utilized to assess the effect of the benchmark anti-TIGIT antibody and CHA.7.518.1.H4(S241P) on antigen-specific tumor cell killing. HLA-A2+ target cell lines used in the assay were the Mel624 (A) and Panc05.04 (B). Synagis hIgG4 is the isotype control antibody. Luciferase activity in the target cells was measured with the Bio-Glo luciferase substrate. Representative data (n≥2) shows the percent specific killing (mean+/−standard deviation) of Mel624 or Panc05.04 cells after a 16-hour co-culture with human CMV-specific CD8+ T cells from three different donors.

[0129] FIG. 100. Dose-dependent tumor cell killing of anti-TIGIT antibodies with CHA.7.518.1.H4(S241P). An in vitro co-culture assay with human CMV-specific CD8+ T cells was utilized to assess the effect of two different anti-TIGIT antibodies, BM26 and CPA.9.086 when combined with CHA.7.518.1.H4(S241P) on antigen-specific Mel624 cell killing. Luciferase activity in the target cells was measured with the Bio-Glo luciferase substrate. Representative data (n≥2) shows the percent specific killing (mean+/−standard deviation) of Mel624 cells after a 16-hour co-culture with human CMV-specific CD8+ T cells from one donor.

[0130] FIG. 101. CPA.9.086 CDR sequences, IMGT and Kabat numbering.

[0131] FIG. 102. Anti-TIGIT hIgG4+CHA.7.518.1.H4(S241P) combination induces tumor cell killing. Co-culture of CMV-reactive CD8+ T cells with Mel624 PVR, PVRL2 & luciferase OE Single dose of 10 μg/ml aTIGIT Ab and 10 μg/ml CHA.7.518.1.H4(S241P) with CMV-reactive donor 4, while dose titration starting at 0.5 μg/ml aTIGIT Ab and 10 μg/ml CHA.7.518.1.H4(S241P) with CMV-reactive donor 156.

### V. DETAILED DESCRIPTION OF THE INVENTION

[0132] A. Overview

[0133] The present invention provides a number of useful antibodies, for use alone or in combination, for treatment of cancer. Cancer can be considered as an inability of the patient to recognize and eliminate cancerous cells. In many instances, these transformed (e.g. cancerous) cells counteract immunosurveillance. There are natural control mechanisms that limit T-cell activation in the body to prevent unrestrained T-cell activity, which can be exploited by cancerous cells to evade or suppress the immune response. Restoring the capacity of immune effector cells-especially T cells-to recognize and eliminate cancer is the goal of immunotherapy. The field of immuno-oncology, sometimes referred to as “immunotherapy” is rapidly evolving, with several recent approvals of T cell checkpoint inhibitory antibodies such as Yervoy, Keytruda and Opdivo. These antibodies are generally referred to as “checkpoint inhibitors” because they block normally negative regulators of T cell immunity. It is generally understood that a variety of immunomodulatory signals, both costimulatory and coinhibitory, can be used to orchestrate an optimal antigen-specific immune response. Generally, these antibodies bind to checkpoint inhibitor proteins such as CTLA-4 or PD-1, which under normal circumstances prevent or suppress activation of cytotoxic T cells (CTLs). By inhibiting the checkpoint protein, for example through the use of antibodies that bind these proteins, an increased T cell response against tumors can be achieved. That is, these cancer checkpoint proteins suppress the immune response; when the proteins are blocked, for example using antibodies to the checkpoint protein, the immune system is activated, leading to immune stimulation, resulting in treatment of conditions such as cancer and infectious disease.

[0134] The present invention is directed to the use of antibodies to additional checkpoint proteins, PVRIG and TIGIT. PVRIG is expressed on the cell surface of NK and T-cells and shares several similarities to other known immune checkpoints. The identification and methods used to show that PVRIG is a checkpoint receptor are discussed in WO2016/134333, expressly incorporated herein by reference. Antibodies to human PVRIG that block the interaction and/or binding of PVLR2 are provided herein. When PVRIG is bound by its ligand (PVRL2), an inhibitory signal is elicited which acts to attenuate the immune response of NK and T-cells against a target cell (i.e. analogous to PD-1/PDL1). Blocking the binding of PVRL2 to PVRIG shuts-off this inhibitory signal of PVRIG and as a result modulates the immune response of NK and T-cells. Utilizing an antibody against PVRIG that blocks binding to PVRL2 is a therapeutic approach that enhances the killing of cancer cells by NK and T-cells. Blocking antibodies have been generated which bind PVRIG and block the binding of its ligand, PVRL2. Anti-PVRIG antibodies in combination with other checkpoint inhibitor antibodies such as PD-1 are provided.

[0135] Similarly, TIGIT has been shown to also have attributes of a checkpoint receptor, and the present invention provides anti-TIGIT antibodies that block the interaction and/or binding of TIGIT to PVR are provided. When TIGIT is bound by its ligand (PVR), an inhibitory signal is elicited which acts to attenuate the immune response of NK and T-cells against a target cell (i.e. analogous to PD-1/PDL1). Blocking the binding of PVR to TIGIT shuts-off this inhibitory signal of TIGIT and as a result modulates the immune response of NK and T-cells. Utilizing an antibody against TIGIT that blocks binding to PVR is a therapeutic approach that enhances the killing of cancer cells by NK and T-cells. Blocking antibodies have been generated which bind TIGIT and block the binding of its ligand, PVR. Anti-TIGIT antibodies in combination with other checkpoint inhibitor antibodies such as PD-1 are provided.

[0136] Additionally, the invention provides combinations of anti-PVRIG and anti-TIGIT antibodies for use in the treatment of cancer.

[0137] B. Definitions

[0138] In order that the application may be more completely understood, several definitions are set forth below. Such definitions are meant to encompass grammatical equivalents.

[0139] By “ablation” herein is meant a decrease or removal of activity. In some embodiments, it is useful to remove activity from the constant domains of the antibodies. Thus, for example, “ablating FcγR binding” means the Fc region amino acid variant has less than 50% starting binding as compared to an Fc region not containing the specific variant, with less than 70-80-90-95-98% loss of activity being preferred, and in general, with the activity being below the level of detectable binding in a Biacore assay. As shown in FIG. 50, one ablation variant in the IgG1 constant region is the N297A variant, which removes the native glycosylation site and significantly reduces the FcγRIIIa binding and thus reduces the antibody dependent cell-mediated cytotoxicity (ADCC).

[0140] By “antigen binding domain” or “ABD” herein is meant a set of six Complementary Determining Regions (CDRs) that, when present as part of a polypeptide sequence, specifically binds a target antigen as discussed herein. Thus, a “TIGIT antigen binding domain” binds TIGIT antigen (the sequence of which is shown in FIG. 51) as outlined herein. Similarly, a “PVRIG antibody binding domain” binds PVRIG antigen (the sequence of which is shown in FIG. 1) as outlined herein. As is known in the art, these CDRs are generally present as a first set of variable heavy CDRs (vhCDRs or V_{H}CDRs) and a second set of variable light CDRs (vlCDRs or V_{L}CDRs), each comprising three CDRs: vhCDR1, vhCDR2, vhCDR3 for the heavy chain and vlCDR1, vlCDR2 and vlCDR3 for the light. The CDRs are present in the variable heavy and variable light domains, respectively, and together form an Fv region. Thus, in some cases, the six CDRs of the antigen binding domain are contributed by a variable heavy and variable light chain. In a “Fab” format, the set of 6 CDRs are contributed by two different polypeptide sequences, the variable heavy domain (vh or V_{H}; containing the vhCDR1, vhCDR2 and vhCDR3) and the variable light domain (vl or V_{L}; containing the vlCDR1, vlCDR2 and vlCDR3), with the C-terminus of the vh domain being attached to the N-terminus of the CH1 domain of the heavy chain and the C-terminus of the vl domain being attached to the N-terminus of the constant light domain (and thus forming the light chain).

[0141] By “modification” herein is meant an amino acid substitution, insertion, and/or deletion in a polypeptide sequence or an alteration to a moiety chemically linked to a protein. For example, a modification may be an altered carbohydrate or PEG structure attached to a protein. By “amino acid modification” herein is meant an amino acid substitution, insertion, and/or deletion in a polypeptide sequence. For clarity, unless otherwise noted, the amino acid modification is always to an amino acid coded for by DNA, e.g. the 20 amino acids that have codons in DNA and RNA.

[0142] By “amino acid substitution” or “substitution” herein is meant the replacement of an amino acid at a particular position in a parent polypeptide sequence with a different amino acid. In particular, in some embodiments, the substitution is to an amino acid that is not naturally occurring at the particular position, either not naturally occurring within the organism or in any organism. For example, the substitution N297A refers to a variant polypeptide, in this case an Fc variant, in which the asparagine at position 297 is replaced with alanine. For clarity, a protein which has been engineered to change the nucleic acid coding sequence but not change the starting amino acid (for example exchanging CGG (encoding arginine) to CGA (still encoding arginine) to increase host organism expression levels) is not an “amino acid substitution”; that is, despite the creation of a new gene encoding the same protein, if the protein has the same amino acid at the particular position that it started with, it is not an amino acid substitution.

[0143] By “amino acid insertion” or “insertion” as used herein is meant the addition of an amino acid sequence at a particular position in a parent polypeptide sequence. For example, −233E or 233E designates an insertion of glutamic acid after position 233 and before position 234. Additionally, −233ADE or A233ADE designates an insertion of AlaAspGlu after position 233 and before position 234.

[0144] By “amino acid deletion” or “deletion” as used herein is meant the removal of an amino acid sequence at a particular position in a parent polypeptide sequence. For example, E233- or E233#, E233( ) or E233del designates a deletion of glutamic acid at position 233. Additionally, EDA233- or EDA233# designates a deletion of the sequence GluAspAla that begins at position 233.

[0145] By “variant protein” or “protein variant”, or “variant” as used herein is meant a protein that differs from that of a parent protein by virtue of at least one amino acid modification. Protein variant may refer to the protein itself, a composition comprising the protein, or the amino sequence that encodes it. Preferably, the protein variant has at least one amino acid modification compared to the parent protein, e.g. from about one to about seventy amino acid modifications, and preferably from about one to about five amino acid modifications compared to the parent. As described below, in some embodiments the parent polypeptide, for example an Fc parent polypeptide, is a human wild type sequence, such as the Fc region from IgG1, IgG2, IgG3 or IgG4, although human sequences with variants can also serve as “parent polypeptides”. The protein variant sequence herein will preferably possess at least about 80% identity with a parent protein sequence, and most preferably at least about 90% identity, more preferably at least about 95-98-99% identity. Variant protein can refer to the variant protein itself, compositions comprising the protein variant, or the DNA sequence that encodes it. Accordingly, by “antibody variant” or “variant antibody” as used herein is meant an antibody that differs from a parent antibody by virtue of at least one amino acid modification, “IgG variant” or “variant IgG” as used herein is meant an antibody that differs from a parent IgG (again, in many cases, from a human IgG sequence) by virtue of at least one amino acid modification, and “immunoglobulin variant” or “variant immunoglobulin” as used herein is meant an immunoglobulin sequence that differs from that of a parent immunoglobulin sequence by virtue of at least one amino acid modification. “Fc variant” or “variant Fc” as used herein is meant a protein comprising an amino acid modification in an Fc domain. The Fc variants of the present invention are defined according to the amino acid modifications that compose them. Thus, for example, S241P or S228P is a hinge variant with the substitution proline at position 228 relative to the parent IgG4 hinge polypeptide, wherein the numbering S228P is according to the EU index and the S241P is the Kabat numbering. The EU index or EU index as in Kabat or EU numbering scheme refers to the numbering of the EU antibody (Edelman et al., 1969, Proc Natl Acad Sci USA 63:78-85, hereby entirely incorporated by reference.) The modification can be an addition, deletion, or substitution. Substitutions can include naturally occurring amino acids and, in some cases, synthetic amino acids. Examples include U.S. Pat. No. 6,586,207; WO 98/48032; WO 03/073238; US2004-0214988A1; WO 05/35727A2; WO 05/74524A2; J. W. Chin et al., (2002), Journal of the American Chemical Society 124:9026-9027; J. W. Chin, & P. G. Schultz, (2002), ChemBioChem 11:1135-1137; J. W. Chin, et al., (2002), PICAS United States of America 99:11020-11024; and, L. Wang, & P. G. Schultz, (2002), Chem. 1-10, all entirely incorporated by reference.

[0146] As used herein, “protein” herein is meant at least two covalently attached amino acids, which includes proteins, polypeptides, oligopeptides and peptides. The peptidyl group may comprise naturally occurring amino acids and peptide bonds, or synthetic peptidomimetic structures, i.e. “analogs”, such as peptoids (see Simon et al., PNAS USA 89(20):9367 (1992), entirely incorporated by reference). The amino acids may either be naturally occurring or synthetic (e.g. not an amino acid that is coded for by DNA); as will be appreciated by those in the art. For example, homo-phenylalanine, citrulline, ornithine and noreleucine are considered synthetic amino acids for the purposes of the invention, and both D- and L- (R or S) configured amino acids may be utilized. The variants of the present invention may comprise modifications that include the use of synthetic amino acids incorporated using, for example, the technologies developed by Schultz and colleagues, including but not limited to methods described by Cropp & Shultz, 2004, Trends Genet. 20(12):625-30, Anderson et al., 2004, Proc Natl Acad Sci USA 101 (2):7566-71, Zhang et al., 2003, 303(5656):371-3, and Chin et al., 2003, Science 301(5635):964-7, all entirely incorporated by reference. In addition, polypeptides may include synthetic derivatization of one or more side chains or termini, glycosylation, PEGylation, circular permutation, cyclization, linkers to other molecules, fusion to proteins or protein domains, and addition of peptide tags or labels.

[0147] By “residue” as used herein is meant a position in a protein and its associated amino acid identity. For example, Asparagine 297 (also referred to as Asn297 or N297) is a residue at position 297 in the human antibody IgG1.

[0148] By “Fab” or “Fab region” as used herein is meant the polypeptide that comprises the VH, CH1, VL, and CL immunoglobulin domains. Fab may refer to this region in isolation, or this region in the context of a full length antibody or antibody fragment.

[0149] By “Fv” or “Fv fragment” or “Fv region” as used herein is meant a polypeptide that comprises the VL and VH domains of a single antibody. As will be appreciated by those in the art, these generally are made up of two chains.

[0150] By “single chain Fv” or “scFv” herein is meant a variable heavy domain covalently attached to a variable light domain, generally using a scFv linker as discussed herein, to form a scFv or scFv domain. A scFv domain can be in either orientation from N- to C-terminus (vh-linker-vl or vl-linker-vh). In general, the linker is a scFv linker as is generally known in the art, with the linker peptide predominantly including the following amino acid residues: Gly, Ser, Ala, or Thr. The linker peptide should have a length that is adequate to link two molecules in such a way that they assume the correct conformation relative to one another so that they retain the desired activity. In one embodiment, the linker is from about 1 to 50 amino acids in length, preferably about 1 to 30 amino acids in length. In one embodiment, linkers of 1 to 20 amino acids in length may be used, with from about 5 to about 10 amino acids finding use in some embodiments. Useful linkers include glycine-serine polymers, including for example (GS)n, (GSGGS)n, (GGGGS)n, and (GGGS)n, where n is an integer of at least one (and generally from 3 to 4), glycine-alanine polymers, alanine-serine polymers, and other flexible linkers. Alternatively, a variety of nonproteinaceous polymers, including but not limited to polyethylene glycol (PEG), polypropylene glycol, polyoxyalkylenes, or copolymers of polyethylene glycol and polypropylene glycol, may find use as linkers, that is may find use as linkers.

[0151] By “IgG subclass modification” or “isotype modification” as used herein is meant an amino acid modification that converts one amino acid of one IgG isotype to the corresponding amino acid in a different, aligned IgG isotype. For example, because IgG1 comprises a tyrosine and IgG2 a phenylalanine at EU position 296, a F296Y substitution in IgG2 is considered an IgG subclass modification. Similarly, because IgG1 has a proline at position 241 and IgG4 has a serine there, an IgG4 molecule with a S241P is considered an IgG subclass modification. Note that subclass modifications are considered amino acid substitutions herein.

[0152] By “non-naturally occurring modification” as used herein is meant an amino acid modification that is not isotypic. For example, because none of the IgGs comprise AN asparagine at position 297, the substitution N297A in IgG1, IgG2, IgG3, or IgG4 (or hybrids thereof) is considered a non-naturally occurring modification.

[0153] By “amino acid” and “amino acid identity” as used herein is meant one of the 20 naturally occurring amino acids that are coded for by DNA and RNA.

[0154] By “effector function” as used herein is meant a biochemical event that results from the interaction of an antibody Fc region with an Fc receptor or ligand. Effector functions include but are not limited to ADCC, ADCP, and CDC.

[0155] By “IgG Fc ligand” as used herein is meant a molecule, preferably a polypeptide, from any organism that binds to the Fc region of an IgG antibody to form an Fc/Fc ligand complex. Fc ligands include but are not limited to FcγRIs, FcγRIIs, FcγRIIIs, FcRn, C1q, C3, mannan binding lectin, mannose receptor, staphylococcal protein A, streptococcal protein G, and viral FcγR. Fc ligands also include Fc receptor homologs (FcRH), which are a family of Fc receptors that are homologous to the FcγRs (Davis et al., 2002, Immunological Reviews 190:123-136, entirely incorporated by reference). Fc ligands may include undiscovered molecules that bind Fc. Particular IgG Fc ligands are FcRn and Fc gamma receptors. By “Fc ligand” as used herein is meant a molecule, preferably a polypeptide, from any organism that binds to the Fc region of an antibody to form an Fc/Fc ligand complex.

[0156] By “parent polypeptide” as used herein is meant a starting polypeptide that is subsequently modified to generate a variant. The parent polypeptide may be a naturally occurring polypeptide, or a variant or engineered version of a naturally occurring polypeptide. Parent polypeptide may refer to the polypeptide itself, compositions that comprise the parent polypeptide, or the amino acid sequence that encodes it. Accordingly, by “parent immunoglobulin” as used herein is meant an unmodified immunoglobulin polypeptide that is modified to generate a variant, and by “parent antibody” as used herein is meant an unmodified antibody that is modified to generate a variant antibody. It should be noted that “parent antibody” includes known commercial, recombinantly produced antibodies as outlined below.

[0157] By “Fc” or “Fc region” or “Fc domain” as used herein is meant the polypeptide comprising the constant region of an antibody excluding the first constant region immunoglobulin domain and in some cases, part of the hinge. Thus Fc refers to the last two constant region immunoglobulin domains of IgA, IgD, and IgG, the last three constant region immunoglobulin domains of IgE and IgM, and the flexible hinge N-terminal to these domains. For IgA and IgM, Fc may include the J chain. For IgG, the Fc domain comprises immunoglobulin domains Cγ2 and Cγ3 (Cγ2 and Cγ3) and the lower hinge region between Cγ1 (Cγ1) and Cγ2 (Cγ2). Although the boundaries of the Fc region may vary, the human IgG heavy chain Fc region is usually defined to include residues C226 or P230 to its carboxyl-terminus, wherein the numbering is according to the EU index as in Kabat. In some embodiments, as is more fully described below, amino acid modifications are made to the Fc region, for example to alter binding to one or more FcγR receptors or to the FcRn receptor.

[0158] By “heavy constant region” herein is meant the CH1-hinge-CH2-CH3 portion of an antibody.

[0159] By “position” as used herein is meant a location in the sequence of a protein. Positions may be numbered sequentially, or according to an established format, for example the EU index for antibody numbering.

[0160] By “target antigen” as used herein is meant the molecule that is bound specifically by the variable region of a given antibody. In the present case, one target antigen of interest herein is TIGIT, usually human TIGIT and optionally cyno TIGIT, as defined below. Another target antigen of interest is PVRIG, usually human PVRIG and optionally cyno PVRIG, as defined below.

[0161] By “target cell” as used herein is meant a cell that expresses a target antigen.

[0162] By “variable region” as used herein is meant the region of an immunoglobulin that comprises one or more Ig domains substantially encoded by any of the Vκ (V.kappa), Vλ (V.lamda), and/or VH genes that make up the kappa, lambda, and heavy chain immunoglobulin genetic loci respectively.

[0163] By “wild type or WT” herein is meant an amino acid sequence or a nucleotide sequence that is found in nature, including allelic variations. A WT protein has an amino acid sequence or a nucleotide sequence that has not been intentionally modified.

[0164] The antibodies of the present invention are generally isolated or recombinant. “Isolated,” when used to describe the various polypeptides disclosed herein, means a polypeptide that has been identified and separated and/or recovered from a cell or cell culture from which it was expressed. Ordinarily, an isolated polypeptide will be prepared by at least one purification step. An “isolated antibody,” refers to an antibody which is substantially free of other antibodies having different antigenic specificities. “Recombinant” means the antibodies are generated using recombinant nucleic acid techniques in exogeneous host cells.

[0165] “Specific binding” or “specifically binds to” or is “specific for” a particular antigen or an epitope means binding that is measurably different from a non-specific interaction. Specific binding can be measured, for example, by determining binding of a molecule compared to binding of a control molecule, which generally is a molecule of similar structure that does not have binding activity. For example, specific binding can be determined by competition with a control molecule that is similar to the target.

[0166] Specific binding for a particular antigen or an epitope can be exhibited, for example, by an antibody having a KD for an antigen or epitope of at least about 10⁻⁹ M, at least about 10⁻¹⁰ M, at least about 10⁻¹¹ M, at least about 10⁻¹² M, at least about 10⁻¹³ M, at least about 10⁻¹⁴ M, at least about 10⁻¹⁵ M, where KD refers to a dissociation rate of a particular antibody-antigen interaction. Typically, an antibody that specifically binds an antigen will have a KD that is 20-, 50-, 100-, 500-, 1000-, 5,000-, 10,000- or more times greater for a control molecule relative to the antigen or epitope.

[0167] Also, specific binding for a particular antigen or an epitope can be exhibited, for example, by an antibody having a KA or Ka for an antigen or epitope of at least 20-, 50-, 100-, 500-, 1000-, 5,000-, 10,000- or more times greater for the epitope relative to a control, where KA or Ka refers to an association rate of a particular antibody-antigen interaction. Binding affinity is generally measured using surface plasmon resonance (e.g. Biacore assay) and flow cytometry with antigen-expressing cells.

[0168] C. Sequences

[0169] The sequence listing provides a number of sequences based on the Format of FIG. 53; reference is made to FIG. 4 of U.S. Ser. No. 62/513,916 (hereby expressly incorporated by reference) as a guide to the labeling of the sequences. The variable heavy domain is labeled with the identifier (e.g. “CPA.0.86”), with the next sequence following the format of FIG. 53 of the present specification (identical to the format of FIG. 4, referenced above), in that the next sequence identifier is to the vhCDR1, the next to vhCDR2, with vhCDR3, the full length heavy chain, the variable light domain, vlCDR1, vlCDR2, vlCDR3 and the full length light chain. Thus an individual antibody has 10 associated sequence identifiers.). Included in the sequence listing are the sequences of BM26 mouse IgG1 (BM26-M1) (WO2016/028656A1, Clone 31C6) and BM29 mouse IgG1 (BM29-M1) (US2016/0176963A1, Clone 22G2). Unless noted, the full length HC sequences of the TIGIT antibodies are in the H4(S241P) format.

[0170] D. PVRIG Proteins

[0171] The present invention provides antibodies that specifically bind to PVRIG proteins and prevent activation by its ligand protein, PVRL2, a human plasma membrane glycoprotein. PVRIG, also called Poliovirus Receptor Related Immunoglobulin Domain Containing Protein, Q6DKI7 or C7orf15, relates to amino acid and nucleic acid sequences shown in RefSeq accession identifier NP_076975, shown in FIG. 1. The sequence of human Poliovirus receptor-related 2 protein (PVLR2, also known as nectin-2, CD112 or herpesvirus entry mediator B, (HVEB)), the binding partner of PVRIG (as shown in Example 5 of US Publication 2016/0244521), is shown in FIG. 2. The antibodies of the invention are specific for the PVRIG extracellular domain such that the binding of PVRIG and PVLR2 is blocked.

[0172] PVRIG is a transmembrane domain protein of 326 amino acids in length, with a signal peptide (spanning from amino acid 1 to 40), an extracellular domain (spanning from amino acid 41 to 171), a transmembrane domain (spanning from amino acid 172 to 190) and a cytoplasmic domain (spanning from amino acid 191 to 326). There are two methionines that can be start codons, but the mature proteins are identical.

[0173] Accordingly, as used herein, the term “PVRIG” or “PVRIG protein” or “PVRIG polypeptide” may optionally include any such protein, or variants, conjugates, or fragments thereof, including but not limited to known or wild type PVRIG, as described herein, as well as any naturally occurring splice variants, amino acid variants or isoforms, and in particular the ECD fragment of PVRIG.

[0174] As noted herein and more fully described below, anti-PVRIG antibodies (including antigen-binding fragments) that both bind to PVRIG and prevent activation by PVRL2 (e.g. most commonly by blocking the interaction of PVRIG and PVLR2), are used to enhance T cell and/or NK cell activation and be used in treating diseases such as cancer and pathogen infection.

[0175] E. TIGIT Proteins

[0176] The present invention provides antibodies that specifically bind to TIGIT proteins and prevent activation by its ligand protein, PVR, poliovirus receptor (aka CD155) a human plasma membrane glycoprotein. TIGIT, or T cell immunoreceptor with Ig and ITIM domains, is a co-inhibiotry receptor protein also known as WUCAM, Vstm3 or Vsig9. TIGIT has an immunoglobulin variable domain, a transmembrane domain, and an immunoreceptor tyrosine-based inhibitory motif (ITIM) and contains signature sequence elements of the PVR protein family. The extracellular domain (ECD) sequences of TIGIT and of PVR are shown in FIG. 51. The antibodies of the invention are specific for the TIGIT ECD such that the binding of TIGIT and PVR is blocked

[0177] Accordingly, as used herein, the term “TIGIT” or “TIGIT protein” or “TIGIT polypeptide” may optionally include any such protein, or variants, conjugates, or fragments thereof, including but not limited to known or wild type TIGIT, as described herein, as well as any naturally occurring splice variants, amino acid variants or isoforms, and in particular the ECD fragment of TIGIT.

[0178] As noted herein and more fully described below, anti-TIGIT antibodies (including antigen-binding fragments) that both bind to TIGIT and prevent activation by PVR (e.g. most commonly by blocking the interaction of TIGIT and PVR), are used to enhance T cell and/or NK cell activation and be used in treating diseases such as cancer and pathogen infection.

### VI. ANTIBODIES

[0179] As is discussed below, the term “antibody” is used generally. Traditional antibody structural units typically comprise a tetramer. Each tetramer is typically composed of two identical pairs of polypeptide chains, each pair having one “light” (typically having a molecular weight of about 25 kDa) and one “heavy” chain (typically having a molecular weight of about 50-70 kDa). Human light chains are classified as kappa and lambda light chains. The present invention is directed to monoclonal antibodies that generally are based on the IgG class, which has several subclasses, including, but not limited to IgG1, IgG2, IgG3, and IgG4. In general, IgG1, IgG2 and IgG4 are used more frequently than IgG3. It should be noted that IgG1 has different allotypes with polymorphisms at 356 (D or E) and 358 (L or M). The sequences depicted herein use the 356D/358M allotype, however the other allotype is included herein. That is, any sequence inclusive of an IgG1 Fc domain included herein can have 356E/358L replacing the 356D/358M allotype.

[0180] The amino-terminal portion of each chain includes a variable region of about 100 to 110 or more amino acids primarily responsible for antigen recognition, generally referred to in the art and herein as the “Fv domain” or “Fv region”. In the variable region, three loops are gathered for each of the V domains of the heavy chain and light chain to form an antigen-binding site. Each of the loops is referred to as a complementarity-determining region (hereinafter referred to as a “CDR”), in which the variation in the amino acid sequence is most significant. “Variable” refers to the fact that certain segments of the variable region differ extensively in sequence among antibodies. Variability within the variable region is not evenly distributed. Instead, the V regions consist of relatively invariant stretches called framework regions (FRs) of 15-30 amino acids separated by shorter regions of extreme variability called “hypervariable regions” that are each 9-15 amino acids long or longer.

[0181] Each VH and VL is composed of three hypervariable regions (“complementary determining regions,” “CDRs”) and four FRs, arranged from amino-terminus to carboxy-terminus in the following order: FR1-CDR1-FR2-CDR2-FR3-CDR3-FR4.

[0182] The hypervariable region generally encompasses amino acid residues from about amino acid residues 24-34 (LCDR1; “L” denotes light chain), 50-56 (LCDR2) and 89-97 (LCDR3) in the light chain variable region and around about 31-35B (HCDR1; “H” denotes heavy chain), 50-65 (HCDR2), and 95-102 (HCDR3) in the heavy chain variable region; Kabat et al., SEQUENCES OF PROTEINS OF IMMUNOLOGICAL INTEREST, 5th Ed. Public Health Service, National Institutes of Health, Bethesda, Md. (1991) and/or those residues forming a hypervariable loop (e.g. residues 26-32 (LCDR1), 50-52 (LCDR2) and 91-96 (LCDR3) in the light chain variable region and 26-32 (HCDR1), 53-55 (HCDR2) and 96-101 (HCDR3) in the heavy chain variable region; Chothia and Lesk (1987) J. Mol. Biol. 196:901-917. Specific CDRs of the invention are described below.

[0183] As will be appreciated by those in the art, the exact numbering and placement of the CDRs can be different among different numbering systems. However, it should be understood that the disclosure of a variable heavy and/or variable light sequence includes the disclosure of the associated (inherent) CDRs. Accordingly, the disclosure of each variable heavy region is a disclosure of the vhCDRs (e.g. vhCDR1, vhCDR2 and vhCDR3) and the disclosure of each variable light region is a disclosure of the vlCDRs (e.g. vlCDR1, vlCDR2 and vlCDR3). A useful comparison of CDR numbering is as below, see Lafranc et al., Dev. Comp. Immunol. 27(1):55-77 (2003):

| | Kabat + | | | | | |
|---|---|---|---|---|---|---|
| | Clothia | IMGT | Kabat | AbM | Chothia | Contact |
| vhCDR1 | 26-35 | 27-38 | 31-35 | 26-35 | 26-32 | 30-35 |
| vhCDR2 | 50-65 | 56-65 | 50-65 | 50-58 | 53-55 | 47-58 |
| vhCDR3 | 95-102 | 105-117 | 95-102 | 95-102 | 96-101 | 93-101 |
| vlCDR1 | 24-34 | 27-38 | 24-34 | 24-34 | 26-32 | 30-36 |
| vlCDR2 | 50-56 | 56-65 | 50-56 | 50-56 | 50-52 | 46-55 |
| vlCDR3 | 89-97 | 105-117 | 89-97 | 89-97 | 91-96 | 89-96 |

[0184] Throughout the present specification, the Kabat numbering system is generally used when referring to a residue in the variable domain (approximately, residues 1-107 of the light chain variable region and residues 1-113 of the heavy chain variable region) and the hinge and the EU numbering system for Fc regions (e.g, Kabat et al., supra (1991)).

[0185] The present invention provides a large number of different CDR sets. In this case, a “full CDR set” comprises the three variable light and three variable heavy CDRs, e.g. a vlCDR1, vlCDR2, vlCDR3, vhCDR1, vhCDR2 and vhCDR3. These can be part of a larger variable light or variable heavy domain, respectfully. In addition, as more fully outlined herein, the variable heavy and variable light domains can be on separate polypeptide chains, when a heavy and light chain is used, or on a single polypeptide chain in the case of scFv sequences.

[0186] The CDRs contribute to the formation of the antigen-binding, or more specifically, epitope binding site of antibodies. “Epitope” refers to a determinant that interacts with a specific antigen binding site in the variable region of an antibody molecule known as a paratope. Epitopes are groupings of molecules such as amino acids or sugar side chains and usually have specific structural characteristics, as well as specific charge characteristics. A single antigen may have more than one epitope.

[0187] The epitope may comprise amino acid residues directly involved in the binding (also called immunodominant component of the epitope) and other amino acid residues, which are not directly involved in the binding, such as amino acid residues which are effectively blocked by the specifically antigen binding peptide; in other words, the amino acid residue is within the footprint of the specifically antigen binding peptide.

[0188] Epitopes may be either conformational or linear. A conformational epitope is produced by spatially juxtaposed amino acids from different segments of the linear polypeptide chain. A linear epitope is one produced by adjacent amino acid residues in a polypeptide chain. Conformational and non-conformational epitopes may be distinguished in that the binding to the former but not the latter is lost in the presence of denaturing solvents.

[0189] An epitope typically includes at least 3, and more usually, at least 5 or 8-10 amino acids in a unique spatial conformation. Antibodies that recognize the same epitope can be verified in a simple immunoassay showing the ability of one antibody to block the binding of another antibody to a target antigen, for example “binning.” As outlined below, the invention not only includes the enumerated antigen binding domains and antibodies herein, but those that compete for binding with the epitopes bound by the enumerated antigen binding domains.

[0190] The carboxy-terminal portion of each chain defines a constant region primarily responsible for effector function. Kabat et al. collected numerous primary sequences of the variable regions of heavy chains and light chains. Based on the degree of conservation of the sequences, they classified individual primary sequences into the CDR and the framework and made a list thereof (see SEQUENCES OF IMMUNOLOGICAL INTEREST, 5th edition, NIH publication, No. 91-3242, E. A. Kabat et al., entirely incorporated by reference).

[0191] In the IgG subclass of immunoglobulins, there are several immunoglobulin domains in the heavy chain. By “immunoglobulin (Ig) domain” herein is meant a region of an immunoglobulin having a distinct tertiary structure. Of interest in the present invention are the heavy chain domains, including, the constant heavy (CH) domains and the hinge domains. In the context of IgG antibodies, the IgG isotypes each have three CH regions. Accordingly, “CH” domains in the context of IgG are as follows: “CH1” refers to positions 118-220 according to the EU index as in Kabat. “CH2” refers to positions 237-340 according to the EU index as in Kabat, and “CH3” refers to positions 341-447 according to the EU index as in Kabat.

[0192] Another type of Ig domain of the heavy chain is the hinge region. By “hinge” or “hinge region” or “antibody hinge region” or “immunoglobulin hinge region” herein is meant the flexible polypeptide comprising the amino acids between the first and second constant domains of an antibody. Structurally, the IgG CH1 domain ends at EU position 220, and the IgG CH2 domain begins at residue EU position 237. Thus for IgG the antibody hinge is herein defined to include positions 221 (D221 in IgG1) to 236 (G236 in IgG1), wherein the numbering is according to the EU index as in Kabat.

[0193] The light chain generally comprises two domains, the variable light domain (containing the light chain CDRs and together with the variable heavy domains forming the Fv region), and a constant light chain region (often referred to as CL or Cκ). In general, either the constant lambda or constant kappa domain can be used, with lambda generally finding use in the invention.

[0194] Another region of interest for additional substitutions, outlined below, is the Fc region.

[0195] A. Chimeric and Humanized Antibodies

[0196] In some embodiments, the antibodies herein can be derived from a mixture from different species, e.g. a chimeric antibody and/or a humanized antibody. In general, both “chimeric antibodies” and “humanized antibodies” refer to antibodies that combine regions from more than one species. For example, “chimeric antibodies” traditionally comprise variable region(s) from a mouse (or rat, in some cases) and the constant region(s) from a human. “Humanized antibodies” generally refer to non-human antibodies that have had the variable-domain framework regions swapped for sequences found in human antibodies. Generally, in a humanized antibody, the entire antibody, except the CDRs, is encoded by a polynucleotide of human origin or is identical to such an antibody except within its CDRs. The CDRs, some or all of which are encoded by nucleic acids originating in a non-human organism, are grafted into the beta-sheet framework of a human antibody variable region to create an antibody, the specificity of which is determined by the engrafted CDRs. The creation of such antibodies is described in, e.g., WO 92/11018, Jones, 1986, Nature 321:522-525, Verhoeyen et al., 1988, Science 239:1534-1536, all entirely incorporated by reference. “Backmutation” of selected acceptor framework residues to the corresponding donor residues is often required to regain affinity that is lost in the initial grafted construct (U.S. Pat. No. 5,530,101; U.S. Pat. No. 5,585,089; U.S. Pat. No. 5,693,761; U.S. Pat. No. 5,693,762; U.S. Pat. No. 6,180,370; U.S. Pat. No. 5,859,205; U.S. Pat. No. 5,821,337; U.S. Pat. No. 6,054,297; U.S. Pat. No. 6,407,213, all entirely incorporated by reference). The humanized antibody optimally also will comprise at least a portion, and usually all, of an immunoglobulin constant region, typically that of a human immunoglobulin, and thus will typically comprise a human Fc region. Humanized antibodies can also be generated using mice with a genetically engineered immune system. Roque et al., 2004, Biotechnol. Prog. 20:639-654, entirely incorporated by reference. A variety of techniques and methods for humanizing and reshaping non-human antibodies are well known in the art (See Tsurushita & Vasquez, 2004, Humanization of Monoclonal Antibodies, Molecular Biology of B Cells, 533-545, Elsevier Science (USA), and references cited therein, all entirely incorporated by reference). Humanization methods include but are not limited to methods described in Jones et al., 1986, Nature 321:522-525; Riechmann et al.,1988; Nature 332:323-329; Verhoeyen et al., 1988, Science, 239:1534-1536; Queen et al., 1989, Proc Natl Acad Sci, USA 86:10029-33; He et al., 1998, J. Immunol. 160: 1029-1035; Carter et al., 1992, Proc Natl Acad Sci USA 89:4285-9, Presta et al., 1997, Cancer Res. 57(20):4593-9; Gorman et al., 1991, Proc. Natl. Acad. Sci. USA 88:4181-4185; O'Connor et al., 1998, Protein Eng 11:321-8, all entirely incorporated by reference. Humanization or other methods of reducing the immunogenicity of nonhuman antibody variable regions may include resurfacing methods, as described for example in Roguska et al., 1994, Proc. Natl. Acad. Sci. USA 91:969-973, entirely incorporated by reference.

[0197] Thus, the vhCDRs and vlCDRs from any of the enumerated antibodies herein may be humanized (or “rehumanized”, for those that were already humanized).

[0198] In certain embodiments, the antibodies of the invention comprise a heavy chain variable region from a particular germline heavy chain immunoglobulin gene and/or a light chain variable region from a particular germline light chain immunoglobulin gene. For example, such antibodies may comprise or consist of a human antibody comprising heavy or light chain variable regions that are “the product of” or “derived from” a particular germline sequence. A human antibody that is “the product of” or “derived from” a human germline immunoglobulin sequence can be identified as such by comparing the amino acid sequence of the human antibody to the amino acid sequences of human germline immunoglobulins and selecting the human germline immunoglobulin sequence that is closest in sequence (i.e., greatest % identity) to the sequence of the human antibody. A human antibody that is “the product of” or “derived from” a particular human germline immunoglobulin sequence may contain amino acid differences as compared to the germline sequence, due to, for example, naturally-occurring somatic mutations or intentional introduction of site-directed mutation. However, a humanized antibody typically is at least 90% identical in amino acids sequence to an amino acid sequence encoded by a human germline immunoglobulin gene and contains amino acid residues that identify the antibody as being derived from human sequences when compared to the germline immunoglobulin amino acid sequences of other species (e.g., murine germline sequences). In certain cases, a humanized antibody may be at least 95, 96, 97, 98 or 99%, or even at least 96%, 97%, 98%, or 99% identical in amino acid sequence to the amino acid sequence encoded by the germline immunoglobulin gene excluding the CDRs. That is, the CDRs may be murine, but the framework regions of the variable region (either heavy or light) can be at least 96%, 97%, 98%, or 99% identical in amino acid sequence to the framework amino acids encoded by one human germline immunoglobulin gene.

[0199] Typically, a humanized antibody derived from a particular human germline sequence will display no more than 10-20 amino acid differences from the amino acid sequence encoded by the human germline immunoglobulin gene. In certain cases, the humanized antibody may display no more than 5, or even no more than 4, 3, 2, or 1 amino acid difference from the amino acid sequence encoded by the germline immunoglobulin gene (again, prior to the introduction of any variants herein; that is, the number of variants is generally low).

[0200] In one embodiment, the parent antibody has been affinity matured, as is known in the art. Structure-based methods may be employed for humanization and affinity maturation, for example as described in U.S. Ser. No. 11/004,590. Selection based methods may be employed to humanize and/or affinity mature antibody variable regions, including but not limited to methods described in Wu et al., 1999, J. Mol. Biol. 294:151-162; Baca et al., 1997, J. Biol. Chem. 272(16):10678-10684; Rosok et al., 1996, J. Biol. Chem. 271(37): 22611-22618; Rader et al., 1998, Proc. Natl. Acad. Sci. USA 95: 8910-8915; Krauss et al., 2003, Protein Engineering 16(10):753-759, all entirely incorporated by reference. Other humanization methods may involve the grafting of only parts of the CDRs, including but not limited to methods described in U.S. Ser. No. 09/810,510; Tan et al., 2002, J. Immunol. 169:1119-1125; De Pascalis et al., 2002, J. Immunol. 169:3076-3084, all entirely incorporated by reference.

[0201] B. Optional Antibody Engineering

[0202] The antibodies of the invention can be modified, or engineered, to alter the amino acid sequences by amino acid substitutions. As discussed herein, amino acid substitutions can be made to alter the affinity of the CDRs for the protein (e.g. TIGIT or PVRIG, including both increasing and decreasing binding), as well as to alter additional functional properties of the antibodies. For example, the antibodies may be engineered to include modifications within the Fc region, typically to alter one or more functional properties of the antibody, such as serum half-life, complement fixation, Fc receptor binding, and/or antigen-dependent cellular cytotoxicity. Furthermore, an antibody according to at least some embodiments of the invention may be chemically modified (e.g., one or more chemical moieties can be attached to the antibody) or be modified to alter its glycosylation, again to alter one or more functional properties of the antibody. Such embodiments are described further below. The numbering of residues in the Fc region is that of the EU index of Kabat.

[0203] In one embodiment, the hinge region of CH1 is modified such that the number of cysteine residues in the hinge region is altered, e.g., increased or decreased. This approach is described further in U.S. Pat. No. 5,677,425 by Bodmer et al. The number of cysteine residues in the hinge region of CH1 is altered to, for example, facilitate assembly of the light and heavy chains or to increase or decrease the stability of the antibody.

[0204] In still another embodiment, the antibody can be modified to abrogate in vivo Fab arm exchange, in particular when IgG4 constant domains are used. Specifically, this process involves the exchange of IgG4 half-molecules (one heavy chain plus one light chain) between other IgG4 antibodies that effectively results in bispecific antibodies which are functionally monovalent. Mutations to the hinge region and constant domains of the heavy chain can abrogate this exchange (see Aalberse, R C, Schuurman J., 2002, Immunology 105:9-19). As outlined herein, a mutation that finds particular use in the present invention is the S241P in the context of an IgG4 constant domain. IgG4 finds use in the present invention as it has no significant effector function, and is thus used to block the receptor binding to its ligand without cell depletion (e.g. PVRIG to PVRL2 or TIGIT to PVR).

[0205] In some embodiments, amino acid substitutions can be made in the Fc region, in general for altering binding to FcγR receptors. By “Fc gamma receptor”, “FcγR” or “FcgammaR” as used herein is meant any member of the family of proteins that bind the IgG antibody Fc region and is encoded by an FcγR gene. In humans this family includes but is not limited to FcγRI (CD64), including isoforms FcγRIa, FcγRIb, and FcγRIc; FcγRII (CD32), including isoforms FcγRIIa (including allotypes H131 and R131), FcγRIIb (including FcγRIIb-1 and FcγRIIb-2), and FcγRIIc; and FcγRIII (CD16), including isoforms FcγRIIIa (including allotypes V158 and F158) and FcγRIIIb (including allotypes FcγRIIIb-NA1 and FcγRIIIb-NA2) (Jefferis et al., 2002, Immunol Lett 82:57-65, entirely incorporated by reference), as well as any undiscovered human FcγRs or FcγR isoforms or allotypes. An FcγR may be from any organism, including but not limited to humans, mice, rats, rabbits, and monkeys. Mouse FcγRs include but are not limited to FcγRI (CD64), FcγRII (CD32), FcγRIII-1 (CD16), and FcγRIII-2 (CD16-2), as well as any undiscovered mouse FcγRs or FcγR isoforms or allotypes.

[0206] There are a number of useful Fc substitutions that can be made to alter binding to one or more of the FcγR receptors. Substitutions that result in increased binding as well as decreased binding can be useful. For example, it is known that increased binding to FcγRIIIa generally results in increased ADCC (antibody dependent cell-mediated cytotoxicity; the cell-mediated reaction wherein nonspecific cytotoxic cells that express FcγRs recognize bound antibody on a target cell and subsequently cause lysis of the target cell. Similarly, decreased binding to FcγRIIb (an inhibitory receptor) can be beneficial as well in some circumstances. Amino acid substitutions that find use in the present invention include those listed in U.S. Ser. No. 11/124,620 (particularly FIG. 41) and U.S. Pat. No. 6,737,056, both of which are expressly incorporated herein by reference in their entirety and specifically for the variants disclosed therein.

[0207] In yet another example, the Fc region is modified to increase the ability of the antibody to mediate antibody dependent cellular cytotoxicity (ADCC) and/or to increase the affinity of the antibody for an Fcγ receptor, and/or increase FcRn binding, by modifying one or more amino acids at the following positions: 238, 239, 248, 249, 252, 254, 255, 256, 258, 265, 267, 268, 269, 270, 272, 276, 278, 280, 283, 285, 286, 289, 290, 292, 293, 294, 295, 296, 298, 301, 303, 305, 307, 309, 312, 315, 320, 322, 324, 326, 327, 329, 330, 331, 333, 334, 335, 337, 338, 340, 360, 373, 376, 378, 382, 388, 389, 398, 414, 416, 419, 430, 434, 435, 437, 438 or 439. This approach is described further in PCT Publication WO 00/42072 by Presta. Moreover, the binding sites on human IgG1 for FcγRI, FcγRII, FcγRIII and FcRn have been mapped and variants with improved binding have been described (see Shields, R. L. et al. (2001) J. Biol. Chem. 276:6591-6604). Specific mutations at positions 256, 290, 298, 333, 334 and 339 are shown to improve binding to FcγRIII. Additionally, the following combination mutants are shown to improve FcγRIII binding: T256A/S298A, S298A/E333A, S298A/K224A and S298A/E333A/K334A. Furthermore, mutations such as M252Y/S254T/T256E or M428L/N434S improve binding to FcRn and increase antibody circulation half-life (see Chan C A and Carter P J (2010) Nature Rev Immunol 10:301-316).

[0208] In addition, the antibodies of the invention are modified to increase its biological half-life. Various approaches are possible. For example, one or more of the following mutations can be introduced: T252L, T254S, T256F, as described in U.S. Pat. No. 6,277,375 to Ward. Alternatively, to increase the biological half-life, the antibody can be altered within the C_{H1} or C_{L} region to contain a salvage receptor binding epitope taken from two loops of a CH2 domain of an Fc region of an IgG, as described in U.S. Pat. Nos. 5,869,046 and 6,121,022 by Presta et al. Additional mutations to increase serum half-life are disclosed in U.S. Pat. Nos. 8,883,973, 6,737,056 and 7,371,826 and include 428L, 434A, 434S, and 428L/434S.

[0209] In still another embodiment, the glycosylation of an antibody is modified. For example, an aglycosylated antibody can be made (i.e., the antibody lacks glycosylation). Glycosylation can be altered to, for example, increase the affinity of the antibody for antigen or reduce effector function such as ADCC. Such carbohydrate modifications can be accomplished by, for example, altering one or more sites of glycosylation within the antibody sequence, for example N297. For example, one or more amino acid substitutions can be made that result in elimination of one or more variable region framework glycosylation sites to thereby eliminate glycosylation at that site, with an alanine replacement finding use in some embodiments.

[0210] Additionally or alternatively, an antibody can be made that has an altered type of glycosylation, such as a hypofucosylated antibody having reduced amounts of fucosyl residues or an antibody having increased bisecting GlcNac structures. Such altered glycosylation patterns have been demonstrated to increase the ADCC ability of antibodies. Such carbohydrate modifications can be accomplished by, for example, expressing the antibody in a host cell with altered glycosylation machinery. Cells with altered glycosylation machinery have been described in the art and can be used as host cells in which to express recombinant antibodies according to at least some embodiments of the invention to thereby produce an antibody with altered glycosylation. See for example, U.S. Patent Publication No. 20040110704 and WO 2003/035835.

[0211] Another modification of the antibodies herein that is contemplated by the invention is PEGylation or the addition of other water soluble moieties, typically polymers, e.g., in order to enhance half-life. An antibody can be PEGylated to, for example, increase the biological (e.g., serum) half-life of the antibody as is known in the art.

[0212] In addition to substitutions made to alter binding affinity to FcγRs and/or FcRn and/or increase in vivo serum half-life, additional antibody modifications can be made, as described in further detail below.

[0213] In some cases, affinity maturation is done. Amino acid modifications in the CDRs are sometimes referred to as “affinity maturation”. An “affinity matured” antibody is one having one or more alteration(s) in one or more CDRs which results in an improvement in the affinity of the antibody for antigen, compared to a parent antibody which does not possess those alteration(s). In some cases, it may be desirable to decrease the affinity of an antibody to its antigen.

[0214] In some embodiments, one or more amino acid modifications are made in one or more of the CDRs of the antibodies of the invention (PVRIG or TIGIT antibodies). In general, only 1 or 2 or 3-amino acids are substituted in any single CDR, and generally no more than from 1, 2, 3. 4, 5, 6, 7, 8 9 or 10 changes are made within a set of 6 CDRs (e.g. vhCDR1-3 and vlCDR1-3). However, it should be appreciated that any combination of no substitutions, 1, 2 or 3 substitutions in any CDR can be independently and optionally combined with any other substitution.

[0215] Affinity maturation can be done to increase the binding affinity of the antibody for the antigen by at least about 10% to 50-100-150% or more, or from 1 to 5 fold as compared to the “parent” antibody. Preferred affinity matured antibodies will have nanomolar or even picomolar affinities for the antigen. Affinity matured antibodies are produced by known procedures. The correlation of affinity and efficacy is discussed below.

[0216] Alternatively, amino acid modifications can be made in one or more of the CDRs of the antibodies of the invention that are “silent”, e.g. that do not significantly alter the affinity of the antibody for the antigen. These can be made for a number of reasons, including optimizing expression (as can be done for the nucleic acids encoding the antibodies of the invention).

[0217] Thus, included within the definition of the CDRs and antibodies of the invention are variant CDRs and antibodies; that is, the antibodies of the invention can include amino acid modifications in one or more of the CDRs of the enumerated antibodies of the invention. In addition, as outlined below, amino acid modifications can also independently and optionally be made in any region outside the CDRs, including framework and constant regions.

a. Generation of Additional Antibodies

[0218] Additional antibodies to human PVRIG can be done as is well known in the art, using well known methods such as those outlined in the examples. Thus, additional anti-PVRIG antibodies can be generated by traditional methods such as immunizing mice (sometimes using DNA immunization, for example, such as is used by Aldevron), followed by screening against human PVRIG protein and hybridoma generation, with antibody purification and recovery.

### VII. TIGIT ANTIBODIES OF THE INVENTION

[0219] The present invention provides anti-TIGIT antibodies. (For convenience, “anti-TIGIT antibodies” and “TIGIT antibodies” are used interchangeably). The anti-TIGIT antibodies of the invention specifically bind to human TIGIT, and preferably the ECD of human TIGIT. The invention further provides antigen binding domains, including full length antibodies, which contain a number of specific, enumerated sets of 6 CDRs, that bind to TIGIT.

[0220] Specific binding for TIGIT or a TIGIT epitope can be exhibited, for example, by an antibody having a K_{D} of at least about 10⁻⁴ M, at least about 10⁻⁵ M, at least about 10⁻⁶ M, at least about 10⁻⁷ M, at least about 10⁻⁸ M, at least about 10⁻⁹ M, alternatively at least about 10⁻¹⁰ M, at least about 10⁻¹¹ M, at least about 10⁻¹² M, at least about 10⁻¹³ M, at least about 10⁻¹⁴ M, at least about 10⁻¹⁵ M, or greater, where K_{D} refers to the equilibrium dissociation constant of a particular antibody-antigen interaction. Typically, an antibody that specifically binds an antigen will have a K_{D} that is 20-, 50-, 100-, 500-, 1000-, 5,000-, 10,000- or more times greater for a control molecule relative to the TIGIT antigen or epitope.

[0221] However, for optimal binding to TIGIT expressed on the surface of NK and T-cells, the antibodies preferably have a KD less 50 nM and most preferably less than 1 nM, with less than 0.1 nM and less than 1 pM finding use in the methods of the invention

[0222] Also, specific binding for a particular antigen or an epitope can be exhibited, for example, by an antibody having a ka (referring to the association rate constant) for a TIGIT antigen or epitope of at least 20-, 50-, 100-, 500-, 1000-, 5,000-, 10,000- or more times greater for the epitope relative to a control, where ka refers to the association rate constant of a particular antibody-antigen interaction.

[0223] In some embodiments, the anti-TIGIT antibodies of the invention bind to human TIGIT with a K_{D} of 100 nM or less, 50 nM or less, 10 nM or less, or 1 nM or less (that is, higher binding affinity), or 1 pM or less, wherein K_{D} is determined by known methods, e.g. surface plasmon resonance (SPR, e.g. Biacore assays), ELISA, KINEXA, and most typically SPR at 25° or 37° C.

[0224] The TIGIT antibodies described herein are labeled as follows. The antibodies have reference numbers, for example “CPA.9.086”. This represents the combination of the variable heavy and variable light chains, as depicted in FIG. 53, for example, with the understanding that these antibodies include two heavy chains and two light chains. “CPA.9.086.VH” refers to the variable heavy portion of CPA. 9. 086, while “CPA. 9. 086.VL” is the variable light chain. “CPA. 9. 086.vhCDR1”, “CPA. 9. 086.vhCDR2”, “CPA. 9. 086.vhCDR3”, “CPA. 9. 086.vlCDR1”, “CPA. 9. 086.vlCDR2”, and “CPA. 9. 086.vlCDR3”, refers to the CDRs are indicated. “CPA. 9. 086.HC” refers to the entire heavy chain (e.g. variable and constant domain) of this molecule, and “CPA. 9. 086.LC” refers to the entire light chain (e.g. variable and constant domain) of the same molecule. In general, the human kappa light chain is used for the constant domain of each phage (or humanized hybridoma) antibody herein, although in some embodiments the lambda light constant domain is used. “CPA. 9. 086.H1” refers to a full length antibody comprising the variable heavy and light domains, including the constant domain of Human IgG1 (hence, the H1; IgG1, IgG2, IgG3 and IgG4 sequences are shown in FIG. 50). Accordingly, “CPA. 9. 086.H2” would be the CPA. 9. 086 variable domains linked to a Human IgG2. “CPA. 9. 086.H3” would be the CPA. 9. 086 variable domains linked to a Human IgG3, and “CPA. 9. 086.H4” would be the CPA. 9. 086 variable domains linked to a Human IgG4. Note that in some cases, the human IgGs may have additional mutations, such are described below, and this can be annotated. For example, in many embodiments, there may be a S241P mutation in the human IgG4, and this can be annotated as “CPA.9.086.H4(S241P)” for example. The human IgG4 sequence with this S241P hinge variant is shown in FIG. 50. Other potential variants are IgG1(N297A), (or other variants that ablate glycosylation at this site and thus many of the effector functions associated with FcγRIIIa binding), and IgG1(D265A), which reduces binding to FcγR receptors.

[0225] The invention further provides variable heavy and light domains as well as full length heavy and light chains.

[0226] In some embodiments, the invention provides scFvs that bind to TIGIT comprising a variable heavy domain and a variable light domain linked by an scFv linker as outlined above. The VL and VH domains can be in either orientation, e.g. from N- to C-terminus “VH-linker-VL” or “VL-linker”VH”. These are named by their component parts; for example, “scFv-CPA. 9.086.VH-linker-VL” or “scFv-CPA.9.086.VL-linker-VH.” Thus, “scFv-CPA.9.086” can be in either orientation.

[0227] In many embodiments, the antibodies of the invention are human (derived from phage) and block binding of TIGIT and PVR. As shown in FIGS. 58 and 75, the CPA antibodies that both bind and block the receptor-ligand interaction are as below, with their components outlined as well (as discussed in the “Sequence” section, the sequences of all but the scFv constructs are in the sequence listing):

[0228] CPA.9.018, CPA.9.018.VH, CPA.9.018.VL, CPA.9.018.HC, CPA.9.018.LC, CPA.9.018.H1, CPA.9.018.H2, CPA.9.018.H3, CPA.9.018.H4; CPA.9.018.H4(S241P); CPA.9.018.vhCDR1, CPA.9.018.vhCDR2, CPA.9.018.vhCDR3, CPA.9.018.vlCDR1, CPA.9.018.vlCDR2, CPA.9.018.vlCDR3 and scFv-CPA.9.018;

[0229] CPA.9.027, CPA.9.027.VH, CPA.9.027.VL, CPA.9.027.HC, CPA.9.027.LC, CPA.9.027.H1, CPA.9.027.H2, CPA.9.027.H3, CPA.9.027.H4; CPA.9.018.H4(S241P); CPA.9.027.vhCDR1, CPA.9.027.vhCDR2, CPA.9.027.vhCDR3, CPA.9.027.vlCDR1, CPA.9.027.vlCDR2, CPA.9.027.vlCDR3 and scFv-CPA.9.027;

[0230] CPA.9.049, CPA.9.049.VH, CPA.9.049.VL, CPA.9.049.HC, CPA.9.049.LC, CPA.9.049.H1, CPA.9.049.H2, CPA.9.049.H3; CPA.9.049.H4; CPA.9.049.H4(S241P); CPA.9.049.vhCDR1, CPA.9.049.vhCDR2, CPA.9.049.vhCDR3, CPA.9.049.vlCDR1, CPA.9.049.vlCDR2, CPA.9.049.vlCDR3 and scFv-CPA.9.049;

[0231] CPA.9.057, CPA.9.057.VH, CPA.9.057.VL, CPA.9.057.HC, CPA.9.057.LC, CPA.9.057.H1, CPA.9.057.H2, CPA.9.057.H3; CPA.9.057.H4; CPA.9.057.H4(S241P); CPA.9.057.vhCDR1, CPA.9.057.vhCDR2, CPA.9.057.vhCDR3, CPA.9.057.vlCDR1, CPA.9.057.vlCDR2, CPA.9.057.vlCDR3 and scFv-CPA.9.057;

[0232] CPA.9.059, CPA.9.059.VH, CPA.9.059.VL, CPA.9.059.HC, CPA.9.059.LC, CPA.9.059.H1, CPA.9.059.H2, CPA.9.059.H3; CPA.9.059.H4; CPA.9.059.H4(S241P); CPA.9.059.vhCDR1, CPA.9.059.vhCDR2, CPA.9.059.vhCDR3, CPA.9.059.vlCDR1, CPA.9.059.vlCDR2, CPA.9.059.vlCDR3 and scFv-CPA.9.059;

[0233] CPA.9.083, CPA.9.083.VH, CPA.9.083.VL, CPA.9.083.HC, CPA.9.083.LC, CPA.9.083.H1, CPA.9.083.H2, CPA.9.083.H3; CPA.9.083.H4; CPA.9.083.H4(S241P); CPA.9.083.vhCDR1, CPA.9.083.vhCDR2, CPA.9.083.vhCDR3, CPA.9.083.vlCDR1, CPA.9.083.vlCDR2, CPA.9.083.vlCDR3 and scFv-CPA.9.083;

[0234] CPA.9.086, CPA.9.086.VH, CPA.9.086.VL, CPA.9.086.HC, CPA.9.086.LC, CPA.9.086.H1, CPA.9.086.H2, CPA.9.086.H3; CPA.9.086.H4; CPA.9.086.H4(S241P); CPA.9.086.vhCDR1, CPA.9.086.vhCDR2, CPA.9.086.vhCDR3, CPA.9.086.vlCDR1, CPA.9.086.vlCDR2, CPA.9.086.vlCDR3 and scFv-CPA.9.086;

[0235] CPA.9.089, CPA.9.089.VH, CPA.9.089.VL, CPA.9.089.HC, CPA.9.089.LC, CPA.9.089.H1, CPA.9.089.H2, CPA.9.089.H3; CPA.9.089.H4; CPA.9.089.H4(S241P); CPA.9.089.vhCDR1, CPA.9.089.vhCDR2, CPA.9.089.vhCDR3, CPA.9.089.vlCDR1, CPA.9.089.vlCDR2, CPA.9.089.vlCDR3 and scFv-CPA.9.089;

[0236] CPA.9.093, CPA.9.093.VH, CPA.9.093.VL, CPA.9.093.HC, CPA.9.093.LC, CPA.9.093.H1, CPA.9.093.H2, CPA.9.093.H3; CPA.9.093.H4; CPA.9.093.H4(S241P); CPA.9.093.vhCDR1, CPA.9.093.vhCDR2, CPA.9.093.vhCDR3, CPA.9.093.vlCDR1, CPA.9.093.vlCDR2, CPA.9.093.vlCDR3 and scFv-CPA.9.093;

[0237] CPA.9.101, CPA.9.101.VH, CPA.9.101.VL, CPA.9.101.HC, CPA.9.101.LC, CPA.9.101.H1, CPA.9.101.H2, CPA.9.101.H3; CPA.9.101.H4; CPA.9.101.H4(S241P); CPA.9.101.vhCDR1, CPA.9.101.vhCDR2, CPA.9.101.vhCDR3, CPA.9.101.vlCDR1, CPA.9.101.vlCDR2, CPA.9.101.vlCDR3 and scFv-CPA.9.101; and

[0238] CPA.9.103, CPA.9.103.VH, CPA.9.103.VL, CPA.9.103.HC, CPA.9.103.LC, CPA.9.103.H1, CPA.9.103.H2, CPA.9.103.H3; CPA.9.103.H4; CPA.9.103.H4(S241P); CPA.9.103.vhCDR1, CPA.9.103.vhCDR2, CPA.9.103.vhCDR3, CPA.9.103.vlCDR1, CPA.9.103.vlCDR2, CPA.9.103.vlCDR3 and scFv-CPA.9.103.

[0239] Furthermore, the present invention provides a number of CHA antibodies, which are murine antibodies generated from hybridomas. As is well known the art, the six CDRs are useful when put into either human framework variable heavy and variable light regions or when the variable heavy and light domains are humanized.

[0240] Accordingly, the present invention provides antibodies, usually full length or scFv domains, that comprise the following sets of CDRs, the sequences of which are shown in FIG. 53 and/or the sequence listing:

[0241] CHA.9.536.1, CHA.9.536.1.VH, CHA.9.536.1.VL, CHA.9.536.1.HC, CHA.9.536.1.LC, CHA.9.536.1.H1, CHA.9.536.1.H2, CHA.9.536.1.H3; CHA.9.536.1.H4, CHA.9.536.1.H4(S241P), CHA.9.536.1.vhCDR1, CHA.9.536.1.vhCDR2, CHA.9.536.1.vhCDR3, CHA.9.536.1.vlCDR1, CHA.9.536.1.vlCDR2 and CHA.9.536.1.vhCDR3;

[0242] CHA.9.536.3, CHA.9.536.3.VH, CHA.9.536.3.VL, CHA.9.536.3.HC, CHA.9.536.3.LC, CHA.9.536.3.H1, CHA.9.536.3.H2, CHA.9.536.3.H3; CHA.9.536.3.H4, CHA.9.536.3.H4(S241P); CHA.9.536.3.vhCDR1, CHA.9.536.3.vhCDR2, CHA.9.536.3.vhCDR3, CHA.9.536.3.vlCDR1, CHA.9.536.3.vlCDR2 and CHA.9.536.3.vhCDR3;

[0243] CHA.9.536.4, CHA.9.536.4.VH, CHA.9.536.4.VL, CHA.9.536.4.HC, CHA.9.536.4.LC, CHA.9.536.4.H1, CHA.9.536.4.H2, CHA.9.536.4.H3; CHA.9.536.4.H4, CHA.9.536.4.H4(S241P), CHA.9.536.4.vhCDR1, CHA.9.536.4.vhCDR2, CHA.9.536.4.vhCDR3, CHA.9.536.4.vlCDR1, CHA.9.536.4.vlCDR2 and CHA.9.536.4.vhCDR3;

[0244] CHA.9.536.5, CHA.9.536.5.VH, CHA.9.536.5.VL, CHA.9.536.5.HC, CHA.9.536.5.LC, CHA.9.536.5.H1, CHA.9.536.5.H2, CHA.9.536.5.H3; CHA.9.536.5.H4, CHA.9.536.5.H4(S241P), CHA.9.536.5.vhCDR1, CHA.9.536.5.vhCDR2, CHA.9.536.5.vhCDR3, CHA.9.536.5.vlCDR1, CHA.9.536.5.vlCDR2 and CHA.9.536.5.vhCDR3;

[0245] CHA.9.536.6, CHA.9.536.6.VH, CHA.9.536.6.VL, CHA.9.536.6.HC, CHA.9.536.6.LC, CHA.9.536.6.H1, CHA.9.536.6.H2, CHA.9.536.6.H3; CHA.9.536.6.H4, CHA.9.536.6.vhCDR1, CHA.9.536.6.vhCDR2, CHA.9.536.6.vhCDR3, CHA.9.536.6.vlCDR1, CHA.9.536.6.vlCDR2 and CHA.9.536.6.vhCDR3;

[0246] CHA.9.536.7, CHA.9.536.7.VH, CHA.9.536.7.VL, CHA.9.536.7.HC, CHA.9.536.7.LC, CHA.9.536.7.H1, CHA.9.536.7.H2, CHA.9.536.7.H3; CHA.9.536.7.H4, CHA.9.536.5.H4(S241P); CHA.9.536.7.vhCDR1, CHA.9.536.7.vhCDR2, CHA.9.536.7.vhCDR3, CHA.9.536.7.vlCDR1, CHA.9.536.7.vlCDR2 and CHA.9.536.7.vhCDR3;

[0247] CHA.9.536.8, CHA.9.536.8.VH, CHA.9.536.8.VL, CHA.9.536.8.HC, CHA.9.536.8.LC, CHA.9.536.8.H1, CHA.9.536.8.H2, CHA.9.536.8.H3; CHA.9.536.8.H4, CHA.9.536.8.H4(S241P), CHA.9.536.8.vhCDR1, CHA.9.536.8.vhCDR2, CHA.9.536.8.vhCDR3, CHA.9.536.8.vlCDR1, CHA.9.536.8.vlCDR2 and CHA.9.536.8.vhCDR3;

[0248] CHA.9.560.1, CHA. 9.560.1VH, CHA. 9.560.1.VL, CHA. 9.560.1.HC, CHA. 9.560.1.LC, CHA. 9.560.1.H1, CHA. 9.560.1.H2, CHA. 9.560.1.H3; CHA. 9.560.1.H4, CHA. 9.560.1.H4(S241P), CHA. 9.560.1.vhCDR1, CHA. 9.560.1.vhCDR2, CHA. 9.560.1.vhCDR3, CHA. 9.560.1.vlCDR1, CHA. 9.560.1.vlCDR2 and CHA. 9.560.1.vhCDR3;

[0249] CHA.9.560.3, CHA. 9.560. 3VH, CHA. 9.560. 3.VL, CHA. 9.560. 3.HC, CHA. 9.560. 3.LC, CHA. 9.560. 3.H1, CHA. 9.560. 3.H2, CHA. 9.560. 3.H3; CHA.9.560.3.H4, CHA.9.560.3.H4(S241P); CHA. 9.560. 3.vhCDR1, CHA. 9.560. 3.vhCDR2, CHA. 9.560. 3.vhCDR3, CHA. 9.560. 3.vlCDR1, CHA. 9.560. 3.vlCDR2 and CHA. 9.560. 3.vhCDR3;

[0250] CHA.9.560.4, CHA. 9.560. 4VH, CHA. 9.560. 4.VL, CHA. 9.560. 4.HC, CHA. 9.560. 4.LC, CHA. 9.560. 4.H1, CHA. 9.560. 4.H2, CHA. 9.560. 4.H3; CHA.9.560.4.H4, CHA.9.560.4.H4(S241P), CHA. 9.560. 4.vhCDR1, CHA. 9.560. 4.vhCDR2, CHA. 9.560. 4.vhCDR3, CHA. 9.560. 4.vlCDR1, CHA. 9.560. 4.vlCDR2 and CHA. 9.560. 4.vhCDR3;

[0251] CHA.9.560.5, CHA. 9.560. 5VH, CHA. 9.560. 5.VL, CHA. 9.560. 5.HC, CHA. 9.560. 5.LC, CHA. 9.560. 5.H1, CHA. 9.560. 5.H2, CHA. 9.560. 5.H3; CHA. 9.560. 5.H4, CHA. 9.560. 5.vhCDR1, CHA. 9.560. 5.vhCDR2, CHA. 9.560. 5.vhCDR3, CHA. 9.560. 5.vlCDR1, CHA. 9.560. 5.vlCDR2 and CHA. 9.560. 5.vhCDR3;

[0252] CHA.9.560.6, CHA. 9.560. 6VH, CHA. 9.560. 6.VL, CHA. 9.560. 6.HC, CHA. 9.560. 6.LC, CHA. 9.560. 6.H1, CHA. 9.560. 6.H2, CHA. 9.560. 6.H3; CHA.9.560.6.H4, CHA.9.560.6.H4(S241P), CHA. 9.560. 6.vhCDR1, CHA. 9.560. 6.vhCDR2, CHA. 9.560. 6.vhCDR3, CHA. 9.560. 6.vlCDR1, CHA. 9.560. 6.vlCDR2 and CHA. 9.560. 6.vhCDR3;

[0253] CHA.9.560.7, CHA. 9.560. 7VH, CHA. 9.560. 7.VL, CHA. 9.560. 7.HC, CHA. 9.560. 7.LC, CHA. 9.560. 7.H1, CHA. 9.560. 7.H2, CHA. 9.560. 7.H3; CHA.9.560.7.H4; CHA.9.560.7.H4(S241P); CHA. 9.560. 7.vhCDR1, CHA. 9.560. 7.vhCDR2, CHA. 9.560. 7.vhCDR3, CHA. 9.560. 7.vlCDR1, CHA. 9.560. 7.vlCDR2 and CHA. 9.560. 7.vhCDR3;

[0254] CHA.9.560.8, CHA. 9.560. 8VH, CHA. 9.560. 8.VL, CHA. 9.560. 8.HC, CHA. 9.560. 8.LC, CHA. 9.560. 8.H1, CHA. 9.560. 8.H2, CHA. 9.560. 8.H3; CHA.9.560.8.H4, CHA.9.560.8.H4(S241P); CHA. 9.560. 8.vhCDR1, CHA. 9.560. 8.vhCDR2, CHA. 9.560. 8.vhCDR3, CHA. 9.560. 8.vlCDR1, CHA. 9.560. 8.vlCDR2 and CHA. 9.560. 8.vhCDR3;

[0255] CHA.9.546.1, CHA. 9. 546.1VH, CHA. 9. 546.1.VL, CHA. 9. 546.1.HC, CHA. 9. 546.1.LC, CHA. 9. 546.1.H1, CHA. 9. 546.1.H2, CHA. 9. 546.1.H3; CHA.9.546.1.H4, CHA.9.546.1.H4(S241P), CHA. 9. 546.1.vhCDR1, CHA. 9. 546.1.vhCDR2, CHA. 9. 546.1.vhCDR3, CHA. 9. 546.1.vlCDR1, CHA. 9. 546.1.vlCDR2 and CHA. 9. 546.1.vhCDR3;

[0256] CHA.9.547.1, CHA. 9. 547.1VH, CHA. 9. 547.1.VL, CHA. 9. 547.1.HC, CHA. 9. 547.1.LC, CHA. 9. 547.1.H1, CHA. 9. 547.1.H2, CHA. 9. 547.1.H3; CHA.9.547.1.H4, CHA.9.547.1.H4(S241P), CHA. 9. 547.1.vhCDR1, CHA. 9. 547.1.vhCDR2, CHA. 9. 547.1.vhCDR3, CHA. 9. 547.1.vlCDR1, CHA. 9. 547.1.vlCDR2 and CHA. 9. 547.1.vhCDR3;

[0257] CHA.9.547.2, CHA. 9. 547. 2VH, CHA. 9. 547. 2.VL, CHA. 9. 547. 2.HC, CHA. 9. 547. 2.LC, CHA. 9. 547. 2.H1, CHA. 9. 547. 2.H2, CHA. 9. 547. 2.H3; CHA.9.547.2.H4, CHA.9.547.2.H4(S241P), CHA. 9. 547. 2.vhCDR1, CHA. 9.547. 2.vhCDR2, CHA. 9. 547. 2.vhCDR3, CHA. 9. 547. 2.vlCDR1, CHA. 9.547. 2.vlCDR2 and CHA. 9. 547. 2.vhCDR3;

[0258] CHA.9.547.3, CHA. 9. 547. 3VH, CHA. 9. 547. 3.VL, CHA. 9. 547. 3.HC, CHA. 9. 547. 3.LC, CHA. 9. 547. 3.H1, CHA. 9. 547. 3.H2, CHA. 9. 547. 3.H3; CHA.9.547.3.H4, CHA.9.547.3.H4(S241P), CHA. 9. 547. 3.vhCDR1, CHA. 9.547. 3.vhCDR2, CHA. 9. 547. 3.vhCDR3, CHA. 9. 547. 3.vlCDR1, CHA. 9.547. 3.vlCDR2 and CHA. 9. 547. 3.vhCDR3;

[0259] CHA.9.547.4, CHA. 9. 547. 4VH, CHA. 9. 547. 4.VL, CHA. 9. 547. 4.HC, CHA. 9.547. 4.LC, CHA. 9. 547. 4.H1, CHA. 9. 547. 4.H2, CHA. 9. 547. 4.H3; CHA.9.547.4.H4, CHA.9.547.4.H4(S241P), CHA. 9. 547. 4.vhCDR1, CHA. 9. 547. 4.vhCDR2, CHA. 9. 547. 4.vhCDR3, CHA. 9. 547. 4.vlCDR1, CHA. 9. 547. 4.vlCDR2 and CHA. 9. 547. 4.vhCDR3;

[0260] CHA.9.547.6, CHA. 9. 547. 6 VH, CHA. 9. 547. 6.VL, CHA. 9. 547. 6.HC, CHA. 9. 547. 6.LC, CHA. 9. 547. 6.H1, CHA. 9. 547. 6.H2, CHA. 9. 547. 6.H3; CHA.9.547.6.H4, CHA.9.547.6.H4(S241P), CHA. 9. 547. 6.vhCDR1, CHA. 9.547. 6.vhCDR2, CHA. 9. 547. 6.vhCDR3, CHA. 9. 547. 6.vlCDR1, CHA. 9.547. 6.vlCDR2 and CHA. 9. 547. 6.vhCDR3;

[0261] CHA.9.547.7, CHA. 9. 547. 7VH, CHA. 9. 547. 7.VL, CHA. 9. 547. 7.HC, CHA. 9. 547. 7.LC, CHA. 9. 547. 7.H1, CHA. 9. 547. 7.H2, CHA. 9. 547. 7.H3; CHA.9.547.7.H4, CHA.9.547.7.H4(S241P), CHA. 9. 547. 7.vhCDR1, CHA. 9.547. 7.vhCDR2, CHA. 9. 547. 7.vhCDR3, CHA. 9. 547. 7.vlCDR1, CHA. 9.547. 7.vlCDR2 and CHA. 9. 547. 7.vhCDR3;

[0262] CHA.9.547.8, CHA. 9. 547. 8VH, CHA. 9. 547. 8.VL, CHA. 9. 547. 8.HC, CHA.9.547.8.LC, CHA. 9. 547. 8.H1, CHA. 9. 547. 8.H2, CHA. 9. 547. 8.H3; CHA.9.547.8.H4, CHA.9.547.8.H4(S241P), CHA. 9. 547. 8.vhCDR1, CHA. 9.547. 8.vhCDR2, CHA. 9. 547. 8.vhCDR3, CHA. 9. 547. 8.vlCDR1, CHA. 9.547. 8.vlCDR2 and CHA. 9. 547. 8.vhCDR3;

[0263] CHA.9.547.9, CHA.9.547.9, CHA.9.547.9VH, CHA.9.547.9.VL, CHA.9. 547.9.HC, CHA.9.547.9.LC, CHA.9.547.9.H1, CHA.9.547.9.H2, CHA.9.547.9.H3; CHA.9.547.9.H4, CHA.9.547.9.H4, CHA.9.547.9.H4(S241P), CHA.9.547.9.H4(S241P), CHA.9.547.9.vhCDR1, CHA.9.547.9.vhCDR2, CHA.9.547.9.vhCDR3, CHA.9.547.9.vlCDR1, CHA.9.547.9.vlCDR2 and CHA.9.547.9.vhCDR3;

[0264] CHA.9.547.13, CHA.9.547.13, CHA.9.547. 13VH, CHA.9. 547.13.VL, CHA.9. 547.13.HC, CHA. 9.547.13.LC, CHA. 9.547.13.H1, CHA.9.547.13.H2, CHA.9. 547.13.H3; CHA.9.547.13.H4, CHA.9.547.13.H4, CHA.9.547.13.H4(S241P), CHA.9.547.13.H4(S241P), CHA. 9. 547.13.vhCDR1, CHA.9.547.13.vhCDR2, CHA.9.547. 13.vhCDR3, CHA. 9. 547.13.vlCDR1, CHA. 9. 547.13.vlCDR2 and CHA. 9. 547. 13.vhCDR3;

[0265] CHA.9.541.1, CHA. 9. 541.1.VH, CHA. 9. 541.1.VL, CHA. 9. 541.1.HC, CHA. 9. 541.1.LC, CHA. 9. 541.1.H1, CHA. 9. 541.1.H2, CHA. 9. 541.1.H3; CHA.9.541.1.H4, CHA.9.541.1.H4(S241P), CHA. 9. 541.1.vhCDR1, CHA. 9. 541.1.vhCDR2, CHA. 9. 541.1.vhCDR3, CHA. 9. 541.1.vlCDR1, CHA. 9. 541.1.vlCDR2 and CHA. 9.541.1.vhCDR3;

[0266] CHA.9.541.3, CHA. 9. 541. 3.VH, CHA. 9. 541. 3.VL, CHA. 9. 541. 3.HC, CHA. 9. 541. 3.LC, CHA. 9. 541. 3.H1, CHA. 9. 541. 3.H2, CHA. 9. 541. 3.H3; CHA.9.541.3.H4, CHA.9.541.3.H4(S241P), CHA. 9. 541. 3.vhCDR1, CHA. 9.541. 3.vhCDR2, CHA. 9. 541. 3.vhCDR3, CHA. 9. 541. 3.vlCDR1, CHA. 9.541. 3.vlCDR2 and CHA. 9.541. 3.vhCDR3;

[0267] CHA.9.541.4, CHA. 9. 541.4.VH, CHA. 9. 541. 4.VL, CHA. 9. 541. 4.HC, CHA. 9. 541. 4.LC, CHA. 9. 541. 4.H1, CHA. 9. 541. 4.H2, CHA. 9. 541. 4.H3; CHA.9.541.4.H4, CHA.9.541.4.H4(S241P), CHA. 9. 541. 4.vhCDR1, CHA. 9. 541. 4.vhCDR2, CHA. 9. 541. 4.vhCDR3, CHA. 9. 541. 4.vlCDR1, CHA. 9. 541. 4.vlCDR2 and CHA. 9.541. 4.vhCDR3;

[0268] CHA.9.541.5, CHA. 9. 541. 5.VH, CHA. 9. 541. 5.VL, CHA. 9. 541. 5.HC, CHA. 9. 541. 5.LC, CHA. 9. 541. 5.H1, CHA. 9. 541. 5.H2, CHA. 9. 541. 5.H3; CHA.9.541.5.H4, CHA.9.541.5.H4(S241P), CHA. 9. 541. 5.vhCDR1, CHA. 9.541. 5.vhCDR2, CHA. 9. 541. 5.vhCDR3, CHA. 9. 541. 5.vlCDR1, CHA. 9.541. 5.vlCDR2 and CHA. 9.541. 5.vhCDR3;

[0269] CHA.9.541.6, CHA. 9. 541. 6.VH, CHA. 9. 541. 6.VL, CHA. 9. 541. 6.HC, CHA. 9. 541. 6.LC, CHA. 9. 541. 6.H1, CHA. 9. 541. 6.H2, CHA. 9. 541.6.H3; CHA.9.541.6.H4, CHA.9.541.6.H4(S241P), CHA. 9. 541. 6.vhCDR1, CHA. 9.541. 6.vhCDR2, CHA. 9. 541. 6.vhCDR3, CHA. 9. 541. 6.vlCDR1, CHA. 9.541. 6.vlCDR2 and CHA. 9.541. 6.vhCDR3;

[0270] CHA.9.541.7, CHA. 9. 541. 7.VH, CHA. 9. 541. 7.VL, CHA. 9. 541. 7.HC, CHA. 9. 541. 7.LC, CHA. 9. 541. 7.H1, CHA. 9. 541. 7.H2, CHA. 9. 541. 7.H3; CHA.9.541.7.H4, CHA.9.541.7.H4(S241P), CHA. 9. 541. 7.vhCDR1, CHA. 9.541. 7.vhCDR2, CHA. 9. 541. 7.vhCDR3, CHA. 9. 541. 7.vlCDR1, CHA. 9.541. 7.vlCDR2 and CHA. 9.541. 7.vhCDR3; and

[0271] CHA.9.541.8, CHA. 9. 541. 8.VH, CHA. 9. 541. 8.VL, CHA. 9. 541. 8.HC, CHA. 9. 541. 8.LC, CHA. 9. 541. 8.H1, CHA. 9. 541. 8.H2, CHA. 9. 541. 8.H3; CHA.9.541.8.H4, CHA.9.541.8.H4(S241P); CHA. 9. 541. 8vhCDR1, CHA. 9. 541. 8.vhCDR2, CHA. 9. 541. 8.vhCDR3, CHA. 9. 541. 8.vlCDR1, CHA. 9.541. 8.vlCDR2 and CHA. 9.541. 8.vhCDR3.

[0272] In the case of scFvs comprising the CDRs of the antibodies above, these are labeled as scFvs that include a scFv comprising a variable heavy domain with the vhCDRs, a linker and a variable light domain with the vhCDRs, again as above in either orientation. Thus the invention includes scFv-CHA.9.536.3.1, scFv-CHA.9.536.3, scFv-CHA.9.536.4, scFv-CHA.9.536.5, scFv-CHA.9.536.7, scFv-CHA.9.536.8, scFv-CHA.9.560.1, scFv-CHA.9.560.3, scFv-CHA.9.560.4, scFv-CHA.9.560.5, scFv-CHA.9.560.6, scFv-CHA.9.560.7, scFv-CHA.9.560.8, scFv-CHA.9.546.1, scFv-CHA.9.547.1, scFv-CHA.9.547.2, scFv-CHA.9.547.3, scFv-CHA.9.547.4, scFv-CHA.9.547.6, scFv-CHA.9.547.7, scFv-CHA.9.547.8, scFv-CHA.9.547.9, scFv-CHA.9.547.13, scFv-CHA.9.541.1, scFv-CHA.9.541.3, scFv-CHA.9.541.4, scFv-CHA.9.541.5, scFv-CHA.9.541.6, scFv-CHA.9.541.7 and scFv-CHA.9.541.8.

[0273] In addition, CHA.9.543 binds to TIGIT but does not block the TIGIT-PVR interaction.

[0274] As discussed herein, the invention further provides variants of the above components (CPA and CHA), including variants in the CDRs, as outlined above. Thus, the invention provides antibodies comprising a set of 6 CDRs as outlined herein that can contain one, two or three amino acid differences in the set of CDRs, as long as the antibody still binds to TIGIT. Suitable assays for testing whether an anti-TIGIT antibody that contains mutations as compared to the CDR sequences outlined herein are known in the art, such as Biacore assays.

[0275] In addition, the invention further provides variants of the above variable heavy and light chains. In this case, the variable heavy chains can be 80%, 90%, 95%, 98% or 99% identical to the “VH” sequences herein, and/or contain from 1, 2, 3, 4, 5, 6, 7, 8, 9, 10 amino acid changes, or more, when Fc variants are used. Variable light chains are provided that can be 80%, 90%, 95%, 98% or 99% identical to the “VL” sequences herein (and in particular CPA.9.086), and/or contain from 1, 2, 3, 4, 5, 6, 7, 8, 9, 10 amino acid changes, or more, when Fc variants are used. In these embodiments, the invention includes these variants as long as the antibody still binds to TIGIT. Suitable assays for testing whether an anti-TIGIT antibody that contains mutations as compared to the CDR sequences outlined herein are known in the art, such as Biacore assays.

[0276] Similarly, heavy and light chains are provided that are 80%, 90%, 95%, 98% or 99% identical to the full length “HC” and “LC” sequences herein (and in particular CPA.9.086), and/or contain from 1, 2, 3, 4, 5, 6, 7, 8, 9, 10 amino acid changes, or more, when Fc variants are used. In these embodiments, the invention includes these variants as long as the antibody still binds to TIGIT. Suitable assays for testing whether an anti-TIGIT antibody that contains mutations as compared to the CDR sequences outlined herein are known in the art, such as Biacore assays.

[0277] In addition, the framework regions of the variable heavy and variable light chains of either the CPA or CHA antibodies herein can be humanized (or, in the case of the CHA antibodies, “rehumanized”, to the extent that alternative humanization methods can be done) as is known in the art (with occasional variants generated in the CDRs as needed), and thus humanized variants of the VH and VL chains of FIG. 53 can be generated (and in particular CPA.9.086). Furthermore, the humanized variable heavy and light domains can then be fused with human constant regions, such as the constant regions from IgG1, IgG2, IgG3 and IgG4 (including IgG4(S241P)).

[0278] In particular, as is known in the art, murine VH and VL chains can be humanized as is known in the art, for example, using the IgBLAST program of the NCBI website, as outlined in Ye et al. Nucleic Acids Res. 41:W34-W40 (2013), herein incorporated by reference in its entirety for the humanization methods. IgBLAST takes a murine VH and/or VL sequence and compares it to a library of known human germline sequences. As shown herein, for the humanized sequences generated herein, the databases used were IMGT human VH genes (F+ORF, 273 germline sequences) and IMGT human VL kappa genes (F+ORF, 74 germline sequences). An exemplary five CHA sequences were chosen: CHA.9.536, CHA9.560, CHA.9.546, CHA.9.547 and CHA.9.541 (see FIG. 53). For this embodiment of the humanization, human germline IGHV1-46(allele1) was chosen for all 5 as the acceptor sequence and the human heavy chain IGHJ4(allele1) joining region (J gene). For three of four (CHA.7.518, CHA.7.530, CHA.7.538_1 and CHA.7.538_2), human germline IGKV1-39(allele 1) was chosen as the acceptor sequence and human light chain IGKJ2(allele1) (J gene) was chosen. The J gene was chosen from human joining region sequences compiled at IMGT® the international ImMunoGeneTics information system as www.imgt.org. CDRs were defined according to the AbM definition (see www.bioinfo.org.uk/abs/).

[0279] In some embodiments, the anti-TIGIT antibodies of the present invention include anti-TIGIT antibodies wherein the V_{H} and V_{L} sequences of different anti-TIGIT antibodies can be “mixed and matched” to create other anti-TIGIT antibodies. TIGIT binding of such “mixed and matched” antibodies can be tested using the binding assays described above. e.g., ELISAs or Biacore assays). In some embodiments, when V_{H} and V_{L} chains are mixed and matched, a V_{H} sequence from a particular V_{H}/V_{L} pairing is replaced with a structurally similar V_{H} sequence. Likewise, in some embodiments, a V_{L} sequence from a particular V_{H}/V_{L} pairing is replaced with a structurally similar V_{L} sequence. For example, the V_{H} and V_{L} sequences of homologous antibodies are particularly amenable for mixing and matching.

[0280] Accordingly, the TIGIT antibodies of the invention comprise CDR amino acid sequences selected from the group consisting of (a) sequences as listed herein; (b) sequences that differ from those CDR amino acid sequences specified in (a) by 1, 2, 3, 4, 5, 6, 7, 8, 9, 10 or more amino acid substitutions; (c) amino acid sequences having 90% or greater, 95% or greater, 98% or greater, or 99% or greater sequence identity to the sequences specified in (a) or (b); (d) a polypeptide having an amino acid sequence encoded by a polynudeotide having a nucleic acid sequence encoding the amino acids as listed herein. In particular, the CPA.9.086 antibody can have sequences selected from (a), (b), (c) or (d).

[0281] Additionally included in the definition of TIGIT antibodies are antibodies that share identity to the TIGIT antibodies enumerated herein. That is, in certain embodiments, an anti-TIGIT antibody according to the invention comprises heavy and light chain variable regions comprising amino acid sequences that are identical to all or part of the anti-TIGIT amino acid sequences of preferred anti-TIGIT antibodies, respectively, wherein the antibodies retain the desired functional properties of the parent anti-TIGIT antibodies. The percent identity between the two sequences is a function of the number of identical positions shared by the sequences (i.e., % homology=# of identical positions/total # of positions×100), taking into account the number of gaps, and the length of each gap, which need to be introduced for optimal alignment of the two sequences. The comparison of sequences and determination of percent identity between two sequences can be accomplished using a mathematical algorithm, as described in the non-limiting examples below.

[0282] The percent identity between two amino acid sequences can be determined using the algorithm of E. Meyers and W. Miller (Comput. Appl. Biosci., 4:11-17 (1988)) which has been incorporated into the ALIGN program (version 2.0), using a PAM120 weight residue table, a gap length penalty of 12 and a gap penalty of 4. In addition, the percent identity between two amino acid sequences can be determined using the Needleman and Wunsch (J. Mol. Biol. 48:444-453 (1970)) algorithm which has been incorporated into the GAP program in the GCG software package (available commercially), using either a Blossum 62 matrix or a PAM250 matrix, and a gap weight of 16, 14, 12, 10, 8, 6, or 4 and a length weight of 1, 2, 3, 4, 5, or 6.

[0283] Additionally or alternatively, the protein sequences of the present invention can further be used as a “query sequence” to perform a search against public databases to, for example, identify related sequences. Such searches can be performed using the XBLAST program (version 2.0) of Altschul, et al. (1990) J Mol. Biol. 215:403-10. BLAST protein searches can be performed with the XBLAST program, score=50, wordlength=3 to obtain amino acid sequences homologous to the antibody molecules according to at least some embodiments of the invention. To obtain gapped alignments for comparison purposes, Gapped BLAST can be utilized as described in Altschul et al., (1997) Nucleic Acids Res. 25(17):3389-3402. When utilizing BLAST and Gapped BLAST programs, the default parameters of the respective programs (e.g., XBLAST and NBLAST) can be used.

[0284] In general, the percentage identity for comparison between TIGIT antibodies is at least 75%, at least 80%, at least 90%, with at least about 95, 96, 97, 98 or 99% percent identity being preferred. The percentage identity may be along the whole amino acid sequence, for example the entire heavy or light chain or along a portion of the chains. For example, included within the definition of the anti-TIGIT antibodies of the invention are those that share identity along the entire variable region (for example, where the identity is 95 or 98% identical along the variable regions), or along the entire constant region, or along just the Fc domain. In particular, the invention provides TIGIT antibodies that have at least 75%, at least 80%, at least 90%, with at least about 95, 96, 97, 98 or 99% percent identity being preferred, with the CPA.9.086 antibody.

[0285] In addition, also included are sequences that may have the identical CDRs but changes in the framework portions of the variable domain (or entire heavy or light chain). For example, TIGIT antibodies include those with CDRs identical to those shown in FIG. 53 but whose identity along the variable region can be lower, for example 95 or 98% percent identical. In particular, the invention provides TIGIT antibodies that have identical CDRs to CPA.9.086 but with framework regions that are 95 or 98% identical to CPA.9.086.

[0286] A. TIGIT Antibodies that Compete for Binding

[0287] The present invention provides not only the enumerated antibodies but additional antibodies that compete with the enumerated antibodies (the CPA numbers enumerated herein that specifically bind to TIGIT) to specifically bind to the TIGIT molecule. As is shown in Example 16, the TIGIT antibodies of the invention “bin” into different epitope bins. Among the 44 TIGIT antibodies in the epitope binning study, there are four communities, each having related pairwise blocking patterns, which separate into 12 total discrete bins outlined herein and shown in FIGS. 67 and 68. There are twelve discrete bins outlined herein; 1) BM9-H4, CHA.9.525, CPA.9.081-H4, CHA.9.538, CHA.9.553, CPA.9.069-H4, CHA.9.543, CHA.9.556, CPA.9.077-H4 and CHA.9.561; 2) CHA.9.560 and CHA.9.528; 3) CHA.9.552, CHA.9.521, CHA.9.541, CHA.9.529, CHA.9.519, CHA.9.527 and CHA.9.549;4) CPA.9.057-H4 and CHA.9.554; 5) CHA.9.546, CPA.9.012-H4, CHA.9.547, CPA.9.013-H4, CPA.9.018-H4, MBSA43-M1, Sino PVR-Fc(ligand), CHA.9.555, PVR-Fc M2A(ligand), BM29-H4, CPA.9.027-H4, CPA.9.049-H4 and CPA.9.053-H4; 6) CPA.9.064-H4; 7) BM26-H4; 8) CPA.9.059-H4; 9) CHA.9.535 and CPA.9.009-H4; 10) CHA.9.536, CHA.9.522 and CPA.9.015-H4; 11) CPA.9.011-H4 and BM8-H4 and 12) CPA.9.071-H4.

[0288] Thus, the invention provides anti-TIGIT antibodies that compete for binding with antibodies that are in discrete epitope bins 1 to 12. In a particular embodiment, the invention provides anti-TIGIT antibodies that compete for binding with CPA.9.086 and are at least 95, 96, 97, 98 or 99% identical to CPA.9.086.

[0289] Additional antibodies that compete with the enumerated antibodies are generated, as is known in the art and generally outlined below. Competitive binding studies can be done as is known in the art, generally using SPR/Biacore® binding assays, as well as ELISA and cell-based assays.

### VIII. PVRIG ANTIBODIES

[0290] The present invention provides anti-PVRIG antibodies. (For convenience, “anti-PVRIG antibodies” and “PVRIG antibodies” are used interchangeably). The anti-PVRIG antibodies of the invention specifically bind to human PVRIG, and preferably the ECD of human PVRIG.

[0291] Specific binding for PVRIG or a PVRIG epitope can be exhibited, for example, by an antibody having a KD of at least about 10⁻⁴ M, at least about 10⁻⁵ M, at least about 10⁻⁶ M, at least about 10⁻⁷ M, at least about 10⁻⁸ M, at least about 10⁻⁹ M, alternatively at least about 10⁻¹⁰ M, at least about 10⁻¹¹ M, at least about 10⁻¹² M, or greater, where KD refers to a dissociation rate of a particular antibody-antigen interaction. Typically, an antibody that specifically binds an antigen will have a KD that is 20-, 50-, 100-, 500-, 1000-, 5,000-, 10,000- or more times greater for a control molecule relative to the PVRIG antigen or epitope.

[0292] However, as shown in the Examples of WO2016/134333, for optimal binding to PVRIG expressed on the surface of NK and T-cells, the antibodies preferably have a KD less 50 nM and most preferably less than 1 nM, with less than 0.1 nM and less than 1 pM and 0.1 pM finding use in the methods of the invention.

[0293] Also, specific binding for a particular antigen or an epitope can be exhibited, for example, by an antibody having a KA or Ka for a PVRIG antigen or epitope of at least 20-, 50-, 100-, 500-, 1000-, 5,000-, 10,000- or more times greater for the epitope relative to a control, where KA or Ka refers to an association rate of a particular antibody-antigen interaction.

[0294] In some embodiments, the anti-PVRIG antibodies of the invention bind to human PVRIG with a K_{D} of 100 nM or less, 50 nM or less, 10 nM or less, or 1 nM or less (that is, higher binding affinity), or 1 pM or less, wherein K_{D} is determined by known methods, e.g. surface plasmon resonance (SPR, e.g. Biacore assays), ELISA, KINEXA, and most typically SPR at 25° or 37° C.

[0295] It is important to note that binding affinity for the anti-PVRIG antibodies is surprisingly correlated with activity. A cumulative analysis of screening data shows that the affinity of the anti-PVRIG antibodies of the invention correlated highly with their ability to bind to primary human T cells. More specifically, the antibodies that gave the highest maximum signal on T cells were those with affinities in the picomolar range. Antibodies that had affinities in the low nanomolar range and above gave relatively weak maximum signals on T cells. Thus, the data indicates that the usefulness of anti-PVRIG antibodies for T cell-based immunotherapy can likely be defined, in part, based on their affinity. Reference is made to antibody sequences from WO2016/134333, hereby incorporated by reference and in particular for the anti-PVRIG antigen binding domains outlined in FIG. 38 (depicting sequences that bind PVRIG and block the interaction of PVRIG and PVRL2), FIG. 39 (depicting sequences that bind PVRIG and do not block the interaction of PVRIG and PVRL2), FIG. 40 (depicting CDRs and data from these antibodies), and FIG. 41 (depicting CDRs from hybridomas that bind and block). That is, the Figures and Legends as well as the particular sequences and SEQ ID NO:s from all CPA.7 and CHA.7 antibodies (including CDRs, VH and VL and full length sequences) from WO2016/134333 are expressly incorporated herein.

[0296] FIG. 45 illustrates the ability of two anti-PVRIG antibodies of different affinities to bind primary CD8 T cells. As shown in FIG. 45, CHA.7.518 has approximately an 8-fold higher affinity than CPA.7.021 (sequence in WO2016/13433) as measured by binding to HEK cells engineered to over-express PVRIG (HEK hPVRIG). Consistent with this, CHA.7.518 has approximately a 13-fold higher affinity than CPA.7.021 as measured by binding to Jurkat cells. The higher affinity of CHA.7.518 did correspond to a greater maximum binding signal from HEK hPVRIG cells, but not Jurkat cells.

[0297] In contrast, CHA.7.518 consistently gave a higher maximum binding signal from primary CD8 T cells, as compared to CPA.7.021. This is illustrated in a binding titration experiment where different concentrations of isotype or anti-PVRIG antibodies were added to primary CD8 T cells, and the resultant maximum binding signal measured. In the two donors illustrated (FIG. 45), CHA.7.518 consistently gave a higher maximum signal (geometric mean fluorescence intensity, gMFI) than CPA.7.021 in a titration dependent manner. gMFIr=geometric fluorescence intensity of the antibody of interest/geometric fluorescence intensity of the control antibody. The gMFIr measures the signal the antibody of interest gives relative to an isotype antibody at a fixed concentration of both.

[0298] Accordingly, the anti-PVRIG antibodies of the invention have binding affinities (as measured using techniques outlined herein) in the picomolar range, e.g. from 0.1 to 9 pM, with from about 0.2 to about 2 being preferred, and from about 0.2 to about 0.5 being of particular use.

[0299] As for the TIGIT antibodies, the PVRIG antibodies are similarly labeled as follows. The antibodies have reference numbers, for example “CHA.7.518.1”. This represents the combination of the variable heavy and variable light chains, as depicted in FIG. 3 for example, with the understanding that these antibodies include two heavy chains and two light chains. “CPA. 7.518.1.VH” refers to the variable heavy portion of CPA. 7.518.1, while “CPA.7.518.1.VL” is the variable light chain. “CPA. 7.518.1.vhCDR1”, “CPA.7.518.1.vhCDR2”, “CPA. 7.518.1.vhCDR3”, “CPA. 7.518.1.vlCDR1”, “CPA. 7.518.1.vlCDR2”, and “CPA. 7.518.1.vlCDR3”, refers to the CDRs are indicated. “CPA. 7.518.1.HC” refers to the entire heavy chain (e.g. variable and constant domain) of this molecule, and “CPA. 7.518.1.LC” refers to the entire light chain (e.g. variable and constant domain) of the same molecule. In general, the human kappa light chain is used for the constant domain of each phage (or humanized hybridoma) antibody herein, although in some embodiments the lambda light constant domain is used. “CPA. 7.518.1.H1” refers to a full-length antibody comprising the variable heavy and light domains, including the constant domain of Human IgG1 (hence, the H1; IgG1, IgG2, IgG3 and IgG4 sequences are shown in FIG. 50). Accordingly, “CPA. 7.518.1.H2” would be the CPA. 7.518.1 variable domains linked to a Human IgG2. “CPA. 7.518.1.H3” would be the CPA. 7.518.1 variable domains linked to a Human IgG3, and “CPA. 7.518.1.H4” would be the CPA. 7.518.1 variable domains linked to a Human IgG4. Note that in some cases, the human IgGs may have additional mutations, such are described below, and this can be annotated. For example, in many embodiments, there may be a S241P mutation in the human IgG4, and this can be annotated as “CPA. 7.518.1.H4(S241P)” for example. The human IgG4 sequence with this S241P hinge variant is shown in FIG. 50. Other potential variants are IgG1(N297A), (or other variants that ablate glycosylation at this site and thus many of the effector functions associated with FcγRIIIa binding), and IgG1(D265A), which reduces binding to FcγR receptors.

[0300] The invention further provides variable heavy and light domains as well as full length heavy and light chains.

[0301] In some embodiments, the invention provides scFvs that bind to PVRIG comprising a variable heavy domain and a variable light domain linked by an scFv linker as outlined above. The VL and VH domains can be in either orientation, e.g. from N- to C-terminus “VH-linker-VL” or “VL-linker”VH”. These are named by their component parts; for example, “scFv-CHA.7.518.1VH-linker-VL” or “scFv-CPA. 7.518.1.VL-linker-VH.” Thus, “scFv-CPA. 7.518.1” can be in either orientation.

### IX. NUCLEIC ACIDS ENCODING ANTIBODIES

[0302] Nucleic acid compositions encoding the antibodies of the invention are also provided, as well as expression vectors containing the nucleic acids and host cells transformed with the nucleic acid and/or expression vector compositions. As will be appreciated by those in the art, the protein sequences depicted herein can be encoded by any number of possible nucleic acid sequences, due to the degeneracy of the genetic code.

[0303] The nucleic acid compositions that encode the antibodies will depend on the format of the antibody. For traditional, tetrameric antibodies containing two heavy chains and two light chains are encoded by two different nucleic acids, one encoding the heavy chain and one encoding the light chain. These can be put into a single expression vector or two expression vectors, as is known in the art, transformed into host cells, where they are expressed to form the antibodies of the invention. In some embodiments, for example when scFv constructs are used, a single nucleic acid encoding the variable heavy chain-linker-variable light chain is generally used, which can be inserted into an expression vector for transformation into host cells. The nucleic acids can be put into expression vectors that contain the appropriate transcriptional and translational control sequences, including, but not limited to, signal and secretion sequences, regulatory sequences, promoters, origins of replication, selection genes, etc.

[0304] Preferred mammalian host cells for expressing the recombinant antibodies according to at least some embodiments of the invention include Chinese Hamster Ovary (CHO cells), PER.C6, HEK293 and others as is known in the art.

[0305] The nucleic acids may be present in whole cells, in a cell lysate, or in a partially purified or substantially pure form. A nucleic acid is “isolated” or “rendered substantially pure” when purified away from other cellular components or other contaminants, e.g., other cellular nucleic acids or proteins, by standard techniques, including alkaline/SDS treatment, CsCl banding, column chromatography, agarose gel electrophoresis and others well known in the art.

[0306] To create a scFv gene, the V_{H}- and V_{L}-encoding DNA fragments are operatively linked to another fragment encoding a flexible linker, e.g., encoding the amino acid sequence (Gly4-Ser)3 and others discussed herein, such that the V_{H} and V_{L} sequences can be expressed as a contiguous single-chain protein, with the V_{L} and V_{H} regions joined by the flexible linker.

### X. FORMULATIONS

[0307] The therapeutic compositions used in the practice of the foregoing methods (and in particular CHA.7.518.1.H4(S241P) and CPA.9.086) can be formulated into pharmaceutical compositions comprising a carrier suitable for the desired delivery method. Suitable carriers include any material that when combined with the therapeutic composition retains the anti-tumor function of the therapeutic composition and is generally non-reactive with the patient's immune system. Examples include, but are not limited to, any of a number of standard pharmaceutical carriers such as sterile phosphate buffered saline solutions, bacteriostatic water, and the like (see, generally, Remington's Pharmaceutical Sciences 16^{th} Edition, A. Osal., Ed., 1980). Acceptable carriers, excipients, or stabilizers are nontoxic to recipients at the dosages and concentrations employed and may include buffers.

[0308] In a preferred embodiment, the pharmaceutical composition that comprises the antibodies of the invention may be in a water-soluble form, such as being present as pharmaceutically acceptable salts, which is meant to include both acid and base addition salts. “Pharmaceutically acceptable acid addition salt” refers to those salts that retain the biological effectiveness of the free bases and that are not biologically or otherwise undesirable, formed with inorganic acids and the like. “Pharmaceutically acceptable base addition salts” include those derived from inorganic bases and the like.

[0309] Administration of the pharmaceutical composition comprising antibodies of the present invention, preferably in the form of a sterile aqueous solution, may be done in a variety of ways, including, but not limited to subcutaneously and intravenously.

[0310] The dosing amounts and frequencies of administration are, in a preferred embodiment, selected to be therapeutically or prophylactically effective. As is known in the art, adjustments for protein degradation, systemic versus localized delivery, and rate of new protease synthesis, as well as the age, body weight, general health, sex, diet, time of administration, drug interaction and the severity of the condition may be necessary, and will be ascertainable with routine experimentation by those skilled in the art.

[0311] In order to treat a patient, a therapeutically effective dose of the Fc variant of the present invention may be administered. By “therapeutically effective dose” herein is meant a dose that produces the effects for which it is administered. The exact dose will depend on the purpose of the treatment, and will be ascertainable by one skilled in the art using known techniques.

### XI. METHODS FOR USING ANTIBODIES

[0312] The antibodies of the invention, including both PVRIG and TIGIT antibodies, can be used in a number of diagnostic and therapeutic applications. In some cases, the decision of which antibody to administer to a patient is done using an evaluation of the expression levels (either gene expression levels or protein expression levels, with the latter being preferred) of sample tumor biopsies to determine whether the sample is overexpressing either TIGIT or PVRIG, or both, to determine what therapeutic antibodies to administer.

[0313] A. Diagnostic Uses

[0314] Accordingly, the antibodies of the invention also find use in the in vitro or in vivo diagnosis, including imaging, of tumors that over-express either PVRIG or TIGIT, respectively. It should be noted, however, that as discussed herein, both TIGIT and PVRIG, as immuno-oncology target proteins, are not necessarily overexpressed on cancer cells, but rather within the immune infiltrates in the cancer. Thus it is the mechanism of action, e.g. activation of immune cells such as T cells and NK cells, that results in cancer diagnosis. Accordingly, these antibodies can be used to diagnose cancer. Diagnosis using PVRIG antibodies is also outlined in WO 2016/134333, [0434 to 0459], hereby incorporated by reference.

[0315] Generally, diagnosis can be done in several ways. In one embodiment, a tissue from a patient, such as a biopsy sample, is contacted with a TIGIT antibody, generally labeled, such that the antibody binds to the endogenous TIGIT. The level of signal is compared to that of normal non-cancerous tissue either from the same patient or a reference sample, to determine the presence or absence of cancer. The biopsy sample can be from a solid tumor, a blood sample (for lymphomas and leukemias such as ALL, T cell lymphoma, etc).

[0316] In general, in this embodiment, the anti-TIGIT is labeled, for example with a fluorophore or other optical label, that is detected using a fluorometer or other optical detection system as is well known in the art. In an alternate embodiment, a secondary labeled antibody is contacted with the sample, for example using an anti-human IgG antibody from a different mammal (mouse, rat, rabbit, goat, etc.) to form a sandwich assay as is known in the art. Alternatively, the anti-TIGIT mAb could be directly labeled (i.e. biotin) and detection can be done by a secondary Ab directed to the labeling agent in the art.

[0317] Once over-expression of TIGIT is seen, treatment can proceed with the administration of an anti-TIGIT antibody according to the invention as outlined herein.

[0318] In other embodiments, in vivo diagnosis is done. Generally, in this embodiment, the anti-TIGIT antibody (including antibody fragments) is injected into the patient and imaging is done. In this embodiment, for example, the antibody is generally labeled with an optical label or an MRI label, such as a gadolinium chelate, radioactive labeling of mAb (including fragments).

[0319] In some embodiments, the antibodies described herein are used for both diagnosis and treatment, or for diagnosis alone. When anti-TIGIT antibodies are used for both diagnosis and treatment, some embodiments rely on two different anti-TIGIT antibodies to two different epitopes, such that the diagnostic antibody does not compete for binding with the therapeutic antibody, although in some cases the same antibody can be used for both. For example, this can be done using antibodies that are in different bins, e.g. that bind to different epitopes on TIGIT, such as outlined herein. Thus included in the invention are compositions comprising a diagnostic antibody and a therapeutic antibody, and in some embodiments, the diagnostic antibody is labeled as described herein. In addition, the composition of therapeutic and diagnostic antibodies can also be co-administered with other drugs as outlined herein.

[0320] Particularly useful antibodies for use in diagnosis include, but are not limited to these enumerated antibodies, or antibodies that utilize the CDRs with variant sequences, or those that compete for binding with any of the antibodies in FIG. 53.

[0321] In many embodiments, a diagnostic antibody is labeled. By “labeled” herein is meant that the antibodies disclosed herein have one or more elements, isotopes, or chemical compounds attached to enable the detection in a screen or diagnostic procedure. In general, labels fall into several classes: a) immune labels, which may be an epitope incorporated as a fusion partner that is recognized by an antibody, b) isotopic labels, which may be radioactive or heavy isotopes, c) small molecule labels, which may include fluorescent and colorimetric dyes, or molecules such as biotin that enable other labeling methods, and d) labels such as particles (including bubbles for ultrasound labeling) or paramagnetic labels that allow body imagining. Labels may be incorporated into the antibodies at any position and may be incorporated in vitro or in vivo during protein expression, as is known in the art.

[0322] Diagnosis can be done either in vivo, by administration of a diagnostic antibody that allows whole body imaging as described below, or in vitro, on samples removed from a patient. “Sample” in this context includes any number of things, including, but not limited to, bodily fluids (including, but not limited to, blood, urine, serum, lymph, saliva, anal and vaginal secretions, perspiration and semen), as well as tissue samples such as result from biopsies of relevant tissues.

[0323] In addition, as outlined below and in the Examples and Figures, information regarding the protein expression levels of either PVRIG or TIGIT, or both, or PVRIG and PD-1, or TIGIT and PD-1, can be used to determine which antibodies should be administered to a patient.

[0324] B. Cancer Treatment

[0325] The antibodies of the invention find particular use in the treatment of cancer. In general, the antibodies of the invention are immunomodulatory, in that rather than directly attack cancerous cells, the antibodies of the invention stimulate the immune system, generally by inhibiting the action of the checkpoint receptor (e.g. PVRIG or TIGIT). Thus, unlike tumor-targeted therapies, which are aimed at inhibiting molecular pathways that are crucial for tumor growth and development, and/or depleting tumor cells, cancer immunotherapy is aimed to stimulate the patient's own immune system to eliminate cancer cells, providing long-lived tumor destruction. Various approaches can be used in cancer immunotherapy, among them are therapeutic cancer vaccines to induce tumor-specific T cell responses, and immunostimulatory antibodies (i.e. antagonists of inhibitory receptors=immune checkpoints) to remove immunosuppressive pathways.

[0326] Clinical responses with targeted therapy or conventional anti-cancer therapies tend to be transient as cancer cells develop resistance, and tumor recurrence takes place. However, the clinical use of cancer immunotherapy in the past few years has shown that this type of therapy can have durable clinical responses, showing dramatic impact on long term survival. However, although responses are long term, only a small number of patients respond (as opposed to conventional or targeted therapy, where a large number of patients respond, but responses are transient).

[0327] By the time a tumor is detected clinically, it has already evaded the immune-defense system by acquiring immunoresistant and immunosuppressive properties and creating an immunosuppressive tumor microenvironment through various mechanisms and a variety of immune cells.

[0328] Accordingly, the antibodies of the invention are useful in treating cancer. Due to the nature of an immuno-oncology mechanism of action, the checkpoint receptor (TIGIT or PVRIG) does not necessarily need to be overexpressed on or correlated with a particular cancer type; that is, the goal is to have the antibodies de-suppress T cell and NK cell activation, such that the immune system will go after the cancers.

[0329] “Cancer,” as used herein, refers broadly to any neoplastic disease (whether invasive or metastatic) characterized by abnormal and uncontrolled cell division causing malignant growth or tumor (e.g., unregulated cell growth.) The term “cancer” or “cancerous” as used herein should be understood to encompass any neoplastic disease (whether invasive, non-invasive or metastatic) which is characterized by abnormal and uncontrolled cell division causing malignant growth or tumor, non-limiting examples of which are described herein. This includes any physiological condition in mammals that is typically characterized by unregulated cell growth. Examples of cancer are exemplified in the working examples and also are described within the specification.

[0330] Non-limiting examples of cancer that can be treated using the antibodies of the invention include, but are not limited to, carcinoma, lymphoma, blastoma, sarcoma, and leukemia. More particular examples of such cancers include squamous cell cancer, lung cancer (including small-cell lung cancer, non-small cell lung cancer, adenocarcinoma of the lung, and squamous carcinoma of the lung), cancer of the peritoneum, hepatocellular cancer, gastric or stomach cancer (including gastrointestinal cancer), pancreatic cancer, glioblastoma, cervical cancer, ovarian cancer, melanoma, non melanoma skin cancer (squamous and basal cell carcinoma), liver cancer, bladder cancer, hepatoma, breast cancer, colon cancer, colorectal cancer, endometrial or uterine carcinoma, salivary gland carcinoma, kidney or renal cancer, liver cancer, prostate cancer, vulval cancer, thyroid cancer, hepatic carcinoma and various types of head and neck cancer, as well as B-cell lymphoma (including low grade/follicular non-Hodgkin's lymphoma (NHL); small lymphocytic (SL) NHL; intermediate grade/follicular NHL; intermediate grade diffuse NHL; high grade immunoblastic NHL; high grade lymphoblastic NHL; high grade small non-cleaved cell NHL; bulky disease NHL; mantle cell lymphoma; AIDS-related lymphoma; and Waldenström's Macroglobulinemia); chronic lymphocytic leukemia (CLL); acute lymphoblastic leukemia (ALL); Hairy cell leukemia; chronic myeloblastic leukemia; multiple myeloma and post-transplant lymphoproliferative disorder (PTLD).

[0331] As shown in the Examples of WO2016/134333, PVRIG is over expressed and/or correlates with tumor lymphocyte infiltration (as demonstrated by correlation to CD3, CD4, CD8 and PD-1 expression) in a number of different tumors of various origins, and thus is useful in treating any cancer, including but not limited to, prostate cancer, liver cancer (HCC), colorectal cancer, ovarian cancer, endometrial cancer, breast cancer, pancreatic cancer, stomach cancer, cervical cancer, head and neck cancer, thyroid cancer, testis cancer, urothelial cancer, lung cancer, melanoma, non melanoma skin cancer (squamous and basal cell carcinoma), glioma, renal cancer (RCC), lymphoma (non-Hodgkins' lymphoma (NHL) and Hodgkin's lymphoma (HD)), Acute myeloid leukemia (AML), T cell Acute Lymphoblastic Leukemia (T-ALL), Diffuse Large B cell lymphoma, testicular germ cell tumors, mesothelioma, and esophageal cancer.

[0332] In particular, CHA.7.518.1H4(S241P) finds use in treating prostate cancer, liver cancer (HCC), colorectal cancer, ovarian cancer, endometrial cancer, breast cancer, pancreatic cancer, stomach cancer, cervical cancer, head and neck cancer, thyroid cancer, testis cancer, urothelial cancer, lung cancer, melanoma, non melanoma skin cancer (squamous and basal cell carcinoma), glioma, renal cancer (RCC), lymphoma (NHL or HL), Acute myeloid leukemia (AML), T cell Acute Lymphoblastic Leukemia (T-ALL), Diffuse Large B cell lymphoma, testicular germ cell tumors, mesothelioma, bladder cancer and esophageal cancer.

[0333] In particular, CHA.7.538.1.2.H4(S241P) finds use in treating prostate cancer, liver cancer (HCC), colorectal cancer, ovarian cancer, endometrial cancer, breast cancer, pancreatic cancer, stomach cancer, cervical cancer, head and neck cancer, thyroid cancer, testis cancer, urothelial cancer, lung cancer, melanoma, non melanoma skin cancer (squamous and basal cell carcinoma), glioma, renal cancer (RCC), lymphoma (NHL or HL), Acute myeloid leukemia (AML), T cell Acute Lymphoblastic Leukemia (T-ALL), Diffuse Large B cell lymphoma, testicular germ cell tumors, mesothelioma, bladder cancer and esophageal cancer.

[0334] In particular, CPA.9.086H4(S241P) finds use in treating prostate cancer, liver cancer (HCC), colorectal cancer, ovarian cancer, endometrial cancer, breast cancer, pancreatic cancer, stomach cancer, cervical cancer, head and neck cancer, thyroid cancer, testis cancer, urothelial cancer, lung cancer, melanoma, non melanoma skin cancer (squamous and basal cell carcinoma), glioma, renal cancer (RCC), lymphoma (NHL or HL), Acute myeloid leukemia (AML), T cell Acute Lymphoblastic Leukemia (T-ALL), Diffuse Large B cell lymphoma, testicular germ cell tumors, mesothelioma, bladder cancer and esophageal cancer.

[0335] In particular CPA.9.083H4(S241P) finds use in treating prostate cancer, liver cancer (HCC), colorectal cancer, ovarian cancer, endometrial cancer, breast cancer, pancreatic cancer, stomach cancer, cervical cancer, head and neck cancer, thyroid cancer, testis cancer, urothelial cancer, lung cancer, melanoma, non melanoma skin cancer (squamous and basal cell carcinoma), glioma, renal cancer (RCC), lymphoma (NHL or HL), Acute myeloid leukemia (AML), T cell Acute Lymphoblastic Leukemia (T-ALL), Diffuse Large B cell lymphoma, testicular germ cell tumors, mesothelioma, bladder cancer and esophageal cancer.

[0336] In particular CHA.9.547.7.H4(S241P) finds use in treating prostate cancer, liver cancer (HCC), colorectal cancer, ovarian cancer, endometrial cancer, breast cancer, pancreatic cancer, stomach cancer, cervical cancer, head and neck cancer, thyroid cancer, testis cancer, urothelial cancer, lung cancer, melanoma, non melanoma skin cancer (squamous and basal cell carcinoma), glioma, renal cancer (RCC), lymphoma (NHL or HL), Acute myeloid leukemia (AML), T cell Acute Lymphoblastic Leukemia (T-ALL), Diffuse Large B cell lymphoma, testicular germ cell tumors, mesothelioma, bladder cancer and esophageal cancer.

[0337] In particular CHA.9.547.13.H4(S241P) finds use in treating prostate cancer, liver cancer (HCC), colorectal cancer, ovarian cancer, endometrial cancer, breast cancer, pancreatic cancer, stomach cancer, cervical cancer, head and neck cancer, thyroid cancer, testis cancer, urothelial cancer, lung cancer, melanoma, non melanoma skin cancer (squamous and basal cell carcinoma), glioma, renal cancer (RCC), lymphoma (NHL or HL), Acute myeloid leukemia (AML), T cell Acute Lymphoblastic Leukemia (T-ALL), Diffuse Large B cell lymphoma, testicular germ cell tumors, mesothelioma, bladder cancer and esophageal cancer.

[0338] C. TIGIT Antibody Monotherapy

[0339] The TIGIT antibodies of the invention find particular use in the treatment of cancer as a monotherapy. Due to the nature of an immuno-oncology mechanism of action, TIGIT does not necessarily need to be overexpressed on or correlated with a particular cancer type; that is, the goal is to have the anti-TIGIT antibodies de-suppress T cell and NK cell activation, such that the immune system will go after the cancers.

[0340] While any anti-TIGIT antibody of FIG. 53 find us in the treatment of cancer (including the activation of T cells as outlined below), CPA.9.086.H4(S241P) , CPA.9.083.H4(S241P), CHA.9.547.7.H4(S241P), and CHA.9.547.13.H4(S241P), find particular use in some embodiments.

[0341] D. PVRIG Antibody Monotherapy

[0342] The PVRIG antibodies of the invention find particular use in the treatment of cancer as a monotherapy. Due to the nature of an immuno-oncology mechanism of action, TIGIT does not necessarily need to be overexpressed on or correlated with a particular cancer type; that is, the goal is to have the anti-TIGIT antibodies de-suppress T cell and NK cell activation, such that the immune system will go after the cancers.

[0343] In particular, CHA.7.518.1H4(S241P) finds use as a monotherapy.

[0344] Similarly, in particular, CHA.7.538.1.2.H4(S241P) finds use as a monotherapy in treating prostate cancer, liver cancer (HCC), colorectal cancer, ovarian cancer, endometrial cancer, breast cancer, pancreatic cancer, stomach cancer, cervical cancer, head and neck cancer, thyroid cancer, testis cancer, urothelial cancer, lung cancer, melanoma, non melanoma skin cancer (squamous and basal cell carcinoma), glioma, renal cancer (RCC), lymphoma (NHL or HL), Acute myeloid leukemia (AML), T cell Acute Lymphoblastic Leukemia (T-ALL), Diffuse Large B cell lymphoma, testicular germ cell tumors, mesothelioma, bladder cancer and esophageal cancer.

[0345] E. Combination Therapies

[0346] As is known in the art, combination therapies comprising a therapeutic antibody targeting an immunotherapy target and an additional therapeutic agent, specific for the disease condition, are showing great promise. For example, in the area of immunotherapy, there are a number of promising combination therapies using a chemotherapeutic agent (either a small molecule drug or an anti-tumor antibody) or with an immuno-oncology antibody.

[0347] The terms “in combination with” and “co-administration” are not limited to the administration of said prophylactic or therapeutic agents at exactly the same time. Instead, it is meant that the antibody and the other agent or agents are administered in a sequence and within a time interval such that they may act together to provide a benefit that is increased versus treatment with only either the antibody of the present invention or the other agent or agents. It is preferred that the antibody and the other agent or agents act additively, and especially preferred that they act synergistically. Such molecules are suitably present in combination in amounts that are effective for the purpose intended. The skilled medical practitioner can determine empirically, or by considering the pharmacokinetics and modes of action of the agents, the appropriate dose or doses of each therapeutic agent, as well as the appropriate timings and methods of administration.

[0348] Accordingly, the antibodies of the present invention may be administered concomitantly with one or more other therapeutic regimens or agents. The additional therapeutic regimes or agents may be used to improve the efficacy or safety of the antibody. Also, the additional therapeutic regimes or agents may be used to treat the same disease or a comorbidity rather than to alter the action of the antibody. For example, an antibody of the present invention may be administered to the patient along with chemotherapy, radiation therapy, or both chemotherapy and radiation therapy.

[0349] 1. TIGIT Antibodies with Chemotherapeutic Small Molecules

[0350] The TIGIT antibodies of the present invention may be administered in combination with one or more other prophylactic or therapeutic agents, including but not limited to cytotoxic agents, chemotherapeutic agents, cytokines, growth inhibitory agents, anti-hormonal agents, kinase inhibitors, anti-angiogenic agents, cardioprotectants, immunostimulatory agents, immunosuppressive agents, agents that promote proliferation of hematological cells, angiogenesis inhibitors, protein tyrosine kinase (PTK) inhibitors, or other therapeutic agents.

[0351] In this context, a “chemotherapeutic agent” is a chemical compound useful in the treatment of cancer. Examples of chemotherapeutic agents include alkylating agents such as thiotepa and cyclosphosphamide, alkyl sulfonates such as busulfan, improsulfan and piposulfan; aziridines such as benzodopa, carboquone, meturedopa, and uredopa; ethylenimines and methylamelamines including altretamine, triethylenemelamine, triethylenephosphoramide, triethylenethiophosphoramide and trimethylolomelamine; acetogenins (especially bullatacin and bullatacinone); delta-9-tetrahydrocannabinol (dronabinol, MARINOL′); beta-lapachone; lapachol; colchicines; betulinic acid; a camptothecin (including the synthetic analogue topotecan (HYCAMTN®), CPT-11 (irinotecan, CAMPTOSAR®), acetylcamptothecin, scopolectin, and 9-aminocamptothecin); bryostatin; callystatin; CC-1065 (including its adozelesin, carzelesin and bizelesin synthetic analogues); podophyllotoxin; podophyllinic acid; teniposide; cryptophycins (particularly cryptophycin 1 and cryptophycin 8); dolastatin; duocarmycin (including the synthetic analogues, KW-2189 and CB1-TM1); eleutherobin; pancratistatin; a sarcodictyin; spongistatin; nitrogen mustards such as chlorambucil, chlornaphazine, cholophosphamide, estramustine, ifosfamide, mechlorethamine, mechlorethamine oxide hydrochloride, melphalan, novembichin, phenesterine, prednimustine, trofosfamide, uracil mustard; nitrosoureas such as carmustine, chlorozotocin, fotemustine, lomustine, nimustine, and ranimnustine; antibiotics such as the enediyne antibiotics (e. g., calicheamicin, especially calicheamicin gammall and calicheamicin omegall (see, e.g., Agnew, Chem Intl. Ed. Engl., 33: 183-186 (1994)); dynemicin, including dynemicin A; an esperamicin; as well as neocarzinostatin chromophore and related chromoprotein enediyne antiobiotic chromophores), adacinomysins, actinomycin, authramycin, azaserine, bleomycin, cactinomycin, carabicin, carminomycin, carzinophilin, chromomycins, dactinomycin, daunorubicin, detorubicin, 6-diazo-5-oxo-L-norleucine, doxorubicin (including morpholino-doxorubicin, cyanomorpholino-doxorubicin, 2-pyrrolino-doxorubicin and deoxydoxorubicin), epirubicin, esorubicin, idarubicin, marcellomycin, mitomycins such as mitomycin C, mycophenolic acid, nogalamycin, olivomycins, peplomycin, porfiromycin, puromycin, quelamycin, rodorubicin, streptonigrin, streptozocin, tubercidin, ubenimex, zinostatin, zorubicin; anti-metabolites such as methotrexate and 5-fluorouracil (5-FU); folic acid analogues such as denopterin, methotrexate, pteropterin, trimetrexate; purine analogs such as fludarabine, 6-mercaptopurine, thiamiprine, thioguanine; pyrimidine analogs such as ancitabine, azacitidine, 6-azauridine, carmofur, cytarabine, dideoxyuridine, doxifluridine, enocitabine, floxuridine; androgens such as calusterone, dromostanolone propionate, epitiostanol, mepitiostane, testolactone; anti-adrenals such as aminoglutethimide, mitotane, trilostane; folic acid replenisher such as frolinic acid; aceglatone; aldophosphamide glycoside; aminolevulinic acid; eniluracil; amsacrine; bestrabucil; bisantrene; edatraxate; defofamine; demecolcine; diaziquone; elfornithine; elliptinium acetate; an epothilone; etoglucid; gallium nitrate; hydroxyurea; lentinan; lonidainine; maytansinoids such as maytansine and ansamitocins; mitoguazone; mitoxantrone; mopidanmol; nitraerine; pentostatin; phenamet; pirarubicin; losoxantrone; 2-ethylhydrazide; procarbazine; PSK® polysaccharide complex (JHS Natural Products, Eugene, Oreg.); razoxane; rhizoxin; sizofiran; spirogermanium; tenuazonic acid; triaziquone; 2,2′,2″-trichlorotriethylamine; trichothecenes (especially T-2 toxin, verracurin A, roridin A and anguidine); urethan; vindesine (ELDISINE®, FILDESIN®); dacarbazine; mannomustine; mitobronitol; mitolactol; pipobroman; gacytosine; arabinoside (“Ara-C”); thiotepa; taxoids, e.g., paclitaxel (TAXOL®; Bristol-Myers Squibb Oncology, Princeton, N.J.), ABRAXANE®, cremophor-free, albumin-engineered nanopartide formulation of paclitaxel (American Pharmaceutical Partners, Schaumberg, Ill.), and docetaxel (TAXOTERE®; Rhone-Poulenc Rorer, Antony, France); chloranbucil; gemcitabine (GEMZARM®); 6-thioguanine; mercaptopurine; methotrexate; platinum analogs such as cisplatin and carboplatin; vinblastine (VELBAN®); platinum; etoposide (VP-16); ifosfamide; mitoxantrone; vincristine (ONCOVIN®); oxaliplatin; leucovovin; vinorelbine (NAVELBINE®); novantrone; edatrexate; daunomycin; aminopterin; ibandronate; topoisomerase inhibitor RFS 2000; difluoromethylornithine (DMFO); retinoids such as retinoic acid; capecitabine (XELODA®); pharmaceutically acceptable salts, acids or derivatives of any of the above; as well as combinations of two or more of the above such as CHOP, an abbreviation for a combined therapy of cyclophosphamide, doxorubicin, vincristine, and prednisolone; CVP, an abbreviation for a combined therapy of cyclophosphamide, vincristine, and prednisolone; and FOLFOX, an abbreviation for a treatment regimen with oxaliplatin (ELOXATIN®) combined with 5-FU and leucovorin.

[0352] According to at least some embodiments, the anti TIGIT immune molecules could be used in combination with any of the known in the art standard of care cancer treatment (as can be found, for example, in http://www.cancer.gov/cancertopics).

[0353] Thus, in some cases, the anti-PVRIG antibodies outlined herein (particularly including CHA.7.538.1.2.H4(S241P) or CHA.7.518.1.H4(S241P)) can be combined with chemotherapeutic agents. Similarly, the anti-TIGIT antibodies outlined herein (particularly including CPA .9.086H4 (S241P), CPA .9.083H4 (S241P) and CHA. 9. 547. 13 .H4(S241P)) can be combined with chemotherapeutic agents.

[0354] In addition, the anti-PVRIG and anti-TIGIT antibodies of the invention can also be administered with other checkpoint inhibitors or activators.

[0355] 2. TIGIT and Checkpoint Antibody Combination Therapy

[0356] As shown herein, the TIGIT antibodies of the invention can be combined with one of a number of checkpoint receptor antibodies. In some embodiments, a patient's tumor may be evaluated for expression of receptors and the results then used to inform a clinician as to which antibodies to administer: PVRIG and PD-1, TIGIT and PD-1 or TIGIT and PVRIG. These assays are described below.

[0357] a. Anti-TIGIT Antibodies in Combination with Anti-PD-1 Antibodies

[0358] In one embodiment, the invention provides combinations of the anti-TIGIT antibodies of the invention and anti-PD-1 antibodies.

[0359] In one embodiment, a biopsy is taken from a tumor from a patient with cancer, and dissociated as is known in the art for FACS analysis. The cells are stained with labeled antibodies to (1) TIGIT (for example using any described herein or others in the art such as MBSA43); (2) PD-1 (for example using those known in the art including EH12.2H7, Keytruda®, Opdivo®, etc.); (3) PD-L1 (for example using those known in the art such as BM-1 outlined herein) and (4) PVR (for example using those known in the art such as SKII.4); and (5) an isotype control antibody. FACS is done, and for each receptor, the percentage of the cells expressing the receptor relative to the control antibody is calculated. If the percentage of positive cells for TIGIT, PD-1, PD-1 and PVR is ≥1% for all 4 receptors, then the patient is treated with antibodies to TIGIT and PD-1 as outlined herein.

[0360] Accordingly, the invention provides combinations of the anti-TIGIT antibodies of the invention and anti-PD-1 antibodies. There are two approved anti-PD-1 antibodies, pembrolizumab (Keytruda®) and nivolumab (Opdivo®) and many more in development which can be used in combination with the anti-TIGIT antibodies of the invention.

[0361] Accordingly, the invention provides the specific combinations of: CPA.9.083.H4(S241P) (as shown in FIG. 53B) with pembrolizumab; CPA.9.083.H4(S241P) as shown in FIG. 53B with nivolumab; CPA.9.086.H4(S241P) as shown in FIG. 53A with pembrolizumab; CPA.9.086.H4(S241P) as shown in FIG. 53A with nivolumab; CHA.9.547.7H4(S241P) with pembrolizumab; CHA.9.547.7H4(S241P with nivolumab; CHA.9.547.13.H4(S241P) with pembrolizumab and CHA.9.547.13.H4(S241P) with nivolumab. (Reference is made to the sequence listing).

[0362] b. Anti-TIGIT Antibodies in Combination with Anti-CTLA-4 Antibodies

[0363] In another embodiment, the invention provides combinations of the anti-TIGIT antibodies of the invention and anti-CTLA-4 antibodies. There are two approved anti-CTLA-4 antibodies, ipilimumab (Yervoy®), and tremelimumab, as well as others in development, which can be used in combination with the anti-TIGIT antibodies of the invention.

[0364] Accordingly, the invention provides the specific combinations of: CPA.9.083.H4(S241P) with ipilimumab; CPA.9.083.H4(S241P) with tremelimumab; CPA.9.086.H4(S241P) with ipilimumab; CPA.9.086.H4(S241P) with tremelimumab; CHA.9.547.7H4(S241P) with ipilimumab; CHA.9.547.7H4(S241P) with tremelimumab; CHA.9.547.13.H4(S241P) with ipilimumab and CHA.9.547.13.H4(S241P) with tremelimumab.

[0365] c. Anti-TIGIT Antibodies in Combination with Anti-PD-L1 Antibodies

[0366] In another embodiment, the invention provides combinations of the anti-TIGIT antibodies of the invention and anti-PD-L1 antibodies. There are three approved anti-PD-L1 antibodies, atezolizumab (TECENTRIQ®), avelumab (BAVENCIO®), and durvalumab (IMFINZI™), as well as other anti-PD-L1 antibodies in development, which can be used in combination with the anti-TIGIT antibodies of the invention.

[0367] Accordingly, the invention provides the specific combinations of: CPA.9.083.H4(S241P) with atezolizumab; CPA.9.083.H4(S241P) with avelumab; CPA.9.083.H4(S241P) with durvalumab; CPA.9.086.H4(S241P) with atezolizumab; CPA.9.086.H4(S241P) with avelumab; CPA.9.086.H4(S241P) with durvalumab; CHA.9.547.7H4(S241P) with atezolizumab; CHA.9.547.7H4(S241P) with avelumab; CHA.9.547.7H4(S241P) with durvalumab; CHA.9.547.13.H4(S241P) with atezolizumab; CHA.9.547.13.H4(S241P) with avelumab; and CHA.9.547.13.H4(S241P) with durvalumab.

[0368] d. Anti-TIGIT Antibodies in Combination with Anti-LAG-3 Antibodies

[0369] In another embodiment, the invention provides combinations of the anti-TIGIT antibodies of the invention and anti-LAG-3 antibodies. There are several anti-LAG-3 antibodies in development, including BMS-986016 (see, International Patent Application No. WO2010/019570A2, incorporated by reference herein in its entirety) GSK2831781 (see, US Patent Applic. No. 2016/0017037A, incorporated by reference herein in its entirety), and Merck clones 22D2, 11C9, 4A10, and/or 19E8 (see, WO2016/028672A1, incorporated by reference herein in its entirety) and GSK2831781 as well as others in development, which can be used in combination with the anti-TIGIT antibodies of the invention.

[0370] Accordingly, the invention provides the specific combinations of: CPA.9.083.H4(S241P) with BMS-986016; CPA.9.083.H4(S241P) with GSK2831781; CPA.9.086.H4(S241P) with BMS-986016; CPA.9.086.H4(S241P) with GSK2831781; CHA.9.547.7H4(S241P) with BMS-986016; CHA.9.547.7H4(S241P) with GSK2831781; CHA.9.547.13.H4(S241P) with BMS-986016 and CHA.9.547.13.H4(S241P) with GSK2831781.

[0371] Accordingly, the invention also provides the specific combinations of: CPA.9.083.H4(S241P) with Merck clones 22D2, 11C9, and/or 4A10; CPA.9.086.H4(S241P) with Merck clones 22D2, 11C9, and/or 4A10; CHA.9.547.7H4(S241P) with Merck clones 22D2, 11C9, and/or 4A10; CHA.9.547.13.H4(S241P) with Merck clones 22D2, 11C9, and/or 4A10.

[0372] e. Anti-TIGIT Antibodies in Combination with Anti-TIM-3 Antibodies

[0373] In another embodiment, the invention provides combinations of the anti-TIGIT antibodies of the invention and anti-TIM-3 antibodies. There is at least one anti-TIM-3 antibody in development, TSR-022, as well as others in development, which can be used in combination with the anti-TIGIT antibodies of the invention.

[0374] Accordingly, the invention provides the specific combinations of: CPA.9.083.H4(S241P) with TSR-022; CPA.9.086.H4(S241P with TSR-0226; CHA.9.547.7H4(S241P) with TSR-022; and CHA.9.547.13.H4(S241P) with TSR-022.

[0375] f. Anti-TIGIT Antibodies in Combination with Anti-BTLA Antibodies

[0376] In another embodiment, the invention provides combinations of the anti-TIGIT antibodies of the invention and anti-BTLA antibodies, see WO2011/014438, hereby incorporated by reference in its entirety, and particularly for the CDRs and full length sequences of the anti-BTLA antibodies disclosed therein. Accordingly, the invention provides the specific combinations of: CPA.9.083.H4(S241P) with an anti-BTLA antibody; CPA.9.086.H4(S241P) with an anti-BTLA antibody; CHA.9.547.7H4(S241P) with an anti-BTLA antibody; and CHA.9.547.13.H4(S241P with an anti-BTLA antibody.

[0377] g. TIGIT Antibodies with Anti-Tumor Antibodies

[0378] In some embodiments, the anti-TIGIT antibodies of the invention are co-administered with antibodies that, unlike immuno-oncology/checkpoint inhibitors that generally act on the immune system to increase a patient's native immune response, instead are directed against a specific tumor target antigen (TTA). There are a wide number of anti-TTA antibodies either approved or in development that can be combined with the present TIGIT antibodies. Currently approved antibodies, include, but are not limited to, cetuximab, panitumumab, nimotuzumab (all to EGFR), rituximab (CD20), trastuzumab and pertuzumab (HER2), alemtuzumab (CD52), bevacizumab (VEGF), ofatumumab (CD20), denosumab (RANK ligand), brentuximab (CD30), daratumumab (CD38), ibritumomab (CD20) and ipilimumab (CTLA-4). Specific target oncology antibodies in clinical trials that can be combined with the anti-TIGIT antibodies herein include, but are not limited to, anti-CTLA4 mAbs, such as ipilimumab, tremelimumab; anti-PD-1 such as nivolumab BMS-936558/MDX-1106/ONO-4538, AMP224, CT-011, MK-3475, anti-PDL-1 antagonists such as BMS-936559/MDX-1105, MEDI4736, RG-7446/MPDL3280A; Anti-LAG-3 such as IMP-321), anti-TIM-3, anti-BTLA, anti-B7-H4, anti-B7-H3, Anti-VISTA; Agonistic antibodies targeting immunostimulatory proteins, including anti-CD40 mAbs such as CP-870,893, lucatumumab, dacetuzumab; anti-CD137 mAbs such as BMS-663513 urelumab (anti-4-1BB; see, for example, U.S. Pat. Nos. 7,288,638 and 8,962,804, incorporated by reference herein in their entireties); PF-05082566 utomilumab (see, for example, U.S. Pat. Nos. 8,821,867; 8,337,850; and 9,468,678, as well as International Patent Application Publication No. WO 2012/032433, incorporated by reference herein in their entireties),; anti-OX40 mAbs, such as anti-OX40 (see, for example, WO2006/029879 or WO2010096418, incorporated by reference herein in their entireties); anti-GITR mAbs such as TRX518 (see, for example, U.S. Pat. No. 7,812,135, incorporated by reference herein in its entirety); anti-CD27 mAbs, such as varlilumab CDX-1127 (see, for example, WO 2016/145085 and U.S. Patent Publication Nos. US 2011/0274685 and US 2012/0213771, incorporated by reference herein in their entireties) anti-ICOS mAbs (for example, MEDI-570, JTX-2011, and anti-TIM3 antibodies (see, for example, WO 2013/006490 or U.S. Patent Publication No US 2016/0257758, incorporated by reference herein in their entireties), as well as monoclonal antibodies to prostate cancer, ovarian cancer, breast cancer, endometrial cancer, multiple myeloma, melanoma, lymphomas, lung cancers including small cell lung cancer, kidney cancer, colorectal cancer, pancreatic cancer, gastric cancer, brain cancer, (see generally www.clinicaltrials.gov).

[0379] 3. PVRIG and PD-1 Combination Therapy

[0380] As shown herein, the PVRIG antibodies of the invention can be combined with one of a number of checkpoint receptor antibodies.

[0381] a. Anti-PVRIG Antibodies in Combination with Anti-PD-1 Antibodies

[0382] In another embodiment, the invention provides combinations of the anti-PVRIG antibodies of the invention and anti-PD-1 antibodies.

[0383] In one embodiment, a biopsy is taken from a tumor from a patient with cancer, and dissociated as is known in the art for FACS analysis. The cells are stained with labeled antibodies to (1) PVRIG (generally using CHA.7.518.1H4(S241P), for example, although any outlined in WO2016/134333 (specifically including any that bind, even if they don't block) or WO2017/041004) can be used); (2) PD-1 (for example using those known in the art including EH12.2H7, Keytruda®, Opdivo®, etc.); (3) PD-L1 (for example using those known in the art such as BM-1 outlined herein) and (4) PVRL2 (for example using those known in the art such as TX11); and (5) an isotype control antibody. FACS is done, and for each receptor, the percentage of the cells expressing the receptor relative to the control antibody is calculated. If the percentage of positive cells for PVRIG, PD-1, PD-1 and PVRL2 is ≥1% for all 4 receptors, then the patient is treated with antibodies to PVRIG and PD-1 as outlined herein.

[0384] There are two approved anti-PD-1 antibodies, pembrolizumab (Keytruda®) and nivolumab (Opdivo®) and many more in development which can be used in combination with the anti-PVRIG antibodies of the invention.

[0385] Accordingly, the invention provides the specific combinations of: CHA.7.518.1.H4(S241P) (as shown in FIG. 3) with pembrolizumab; CHA.7.518.1.H4(S241P) as shown in FIG. 3 with nivolumab; CHA.7.538.1.2.H4(S241P) as shown in FIG. 3 with pembrolizumab and CHA.7.538.1.2.H4(S241P) as shown in with nivolumab.

[0386] b. Anti-PVRIG Antibodies in Combination with Anti-CTLA-4 Antibodies

[0387] In another embodiment, the invention provides combinations of the anti-PVRIG antibodies of the invention and anti-CTLA-4 antibodies. There are two approved anti-CTLA-4 antibodies, ipilimumab (Yervoy®), and tremelimumab, as well as others in development, which can be used in combination with the anti-TIGIT antibodies of the invention.

[0388] Accordingly, the invention provides the specific combinations of: CHA.7.518.1.H4(S241P) with ipilimumab; CHA.7.518.1.H4(S241P) with tremelimumab; CHA.7.538.1.2.H4(S241P) with ipilimumab and CHA.7.538.1.2.H4(S241P) with tremelimumab.

[0389] c. Anti-PVRIG Antibodies in Combination with Anti-PD-L1 Antibodies

[0390] In another embodiment, the invention provides combinations of the anti-PVRIG antibodies of the invention and anti-PD-L1 antibodies. There are three approved anti-PD-L1 antibodies, atezolizumab (TECENTRIQ®), avelumab (BAVENCIO®), and durvalumab, as well as other anti-PD-L1 antibodies in development, which can be used in combination with the anti-TIGIT antibodies of the invention.

[0391] Accordingly, the invention provides the specific combinations of: CHA.7.518.1.H4(S241P) with atezolizumab; CPA.7518.1.H4(S241P) with avelumab; CHA.7.518.1.H4(S241P) with durvalumab; CHA.7.538.1.2.H4(S241P) with atezolizumab; CHA.7.538.1.2.H4(S241P) with avelumab and CHA.7.538.1.2.H4(S241P) with durvalumab.

[0392] d. Anti-PVRIG Antibodies in Combination with Anti-LAG-3 Antibodies

[0393] In another embodiment, the invention provides combinations of the anti-PVRIG antibodies of the invention and anti-LAG-3 antibodies. There are several anti-LAG-3 antibodies in development, including BMS-986016 (see, International Patent Application No. WO2010/019570A2, incorporated by reference herein in its entirety) GSK2831781 (see, US Patent Applic. No. 2016/0017037A, incorporated by reference herein in its entirety), and Merck clones 22D2, 11C9, 4A10, and/or 19E8 (see, WO2016/028672A1, incorporated by reference herein in its entirety) and GSK2831781 as well as others in development, which can be used in combination with the anti-PVRIG antibodies of the invention.

[0394] Accordingly, the invention provides the specific combinations of: CHA.7.518.1.H4(S241P) with BMS-986016; CHA.7.518.1.H4(S241P) with GSK2831781; CHA.7.538.1.2.H4(S241P) with BMS-986016 and CHA.7.538.1.2.H4(S241P) with GSK2831781.

[0395] Accordingly, the invention also provides the specific combinations of: CHA.7.518.1.H4(S241P) with Merck clones 22D2, 11C9, and/or 4A10 and CHA.7.538.1.2.H4(S241P) with Merck clones 22D2, 11C9, and/or 4A10.

[0396] e. Anti-PVRIG Antibodies in Combination with Anti-TIM-3 Antibodies

[0397] In another embodiment, the invention provides combinations of the anti-PVRIG antibodies of the invention and anti-TIM-3 antibodies. There is at least one anti-TIM-3 antibody in development, TSR-022, as well as others in development, which can be used in combination with the anti-PVRIG antibodies of the invention.

[0398] Accordingly, the invention provides the specific combinations of: CHA.7.518.1.H4(S241P) with TSR-022 and CHA.7.538.1.2.H4(S241P) with TSR-0226.

[0399] f. Anti-PVRIG Antibodies in Combination with Anti-BTLA Antibodies

[0400] In another embodiment, the invention provides combinations of the anti-PVRIG antibodies of the invention and anti-BTLA antibodies, see WO2011/014438, hereby incorporated by reference in its entirety, and particularly for the CDRs and full length sequences of the anti-BTLA antibodies disclosed therein. Accordingly, the invention provides the specific combinations of: CHA.7.518.1.H4(S241P) with an anti-BTLA antibody and CHA.7.538.1.2.H4(S241P) with an anti-BTLA antibody.

[0401] g. PVRIG Antibodies with Anti-Tumor Antibodies

[0402] In some embodiments, the anti-PVRIG antibodies of the invention are co-administered with antibodies that, unlike immuno-oncology/checkpoint inhibitors that generally act on the immune system to increase a patient's native immune response, instead are directed against a specific tumor target antigen (TTA). There are a wide number of anti-TTA antibodies either approved or in development that can be combined with the present PVRIG antibodies, including CHA.7.518.1.H4(S241P) and CHA.7.538.1.2.H4(S241P). Currently approved antibodies, include, but are not limited to, cetuximab, panitumumab, nimotuzumab (all to EGFR), rituximab (CD20), trastuzumab and pertuzumab (HER2), alemtuzumab (CD52), bevacizumab (VEGF), ofatumumab (CD20), denosumab (RANK ligand), brentuximab (CD30), daratumumab (CD38), ibritumomab (CD20) and ipilimumab (CTLA-4). Specific target oncology antibodies in clinical trials that can be combined with the anti-PVRIG antibodies herein include, but are not limited to, anti-CTLA4 mAbs, such as ipilimumab, tremelimumab; anti-PD-1 such as nivolumab BMS-936558/MDX-1106/ONO-4538, AMP224, CT-011, MK-3475, anti-PDL-1 antagonists such as BMS-936559/MDX-1105, MEDI4736, RG-7446/MPDL3280A; Anti-LAG-3 such as IMP-321), anti-TIM-3, anti-BTLA, anti-B7-H4, anti-B7-H3, Anti-VISTA; Agonistic antibodies targeting immunostimulatory proteins, including anti-CD40 mAbs such as CP-870,893, lucatumumab, dacetuzumab; anti-CD137 mAbs such as BMS-663513 urelumab (anti-4-1BB; see, for example, U.S. Pat. Nos. 7,288,638 and 8,962,804, incorporated by reference herein in their entireties); PF-05082566 utomilumab (see, for example, U.S. Pat. Nos. 8,821,867; 8,337,850; and 9,468,678, as well as International Patent Application Publication No. WO 2012/032433, incorporated by reference herein in their entireties),; anti-OX40 mAbs, such as anti-OX40 (see, for example, WO2006/029879 or WO2010096418, incorporated by reference herein in their entireties); anti-GITR mAbs such as TRX518 (see, for example, U.S. Pat. No. 7,812,135, incorporated by reference herein in its entirety); anti-CD27 mAbs, such as varlilumab CDX-1127 (see, for example, WO 2016/145085 and U.S. Patent Publication Nos. US 2011/0274685 and US 2012/0213771, incorporated by reference herein in their entireties) anti-ICOS mAbs (for example, MEDI-570, JTX-2011, and anti-TIM3 antibodies (see, for example, WO 2013/006490 or U.S. Patent Publication No US 2016/0257758, incorporated by reference herein in their entireties), as well as monoclonal antibodies to prostate cancer, ovarian cancer, breast cancer, endometrial cancer, multiple myeloma, melanoma, lymphomas, lung cancers including small cell lung cancer, kidney cancer, colorectal cancer, pancreatic cancer, gastric cancer, brain cancer, (see generally www.clinicaltrials.gov).

[0403] 4. PVRIG and TIGIT Combination Therapy

[0404] There are specific combinations of anti-TIGIT and anti-PVRIG antibodies that find use in particular embodiments.

[0405] In one embodiment, a biopsy is taken from a tumor from a patient with cancer, and dissociated as is known in the art for FACS analysis. The cells are stained with labeled antibodies to (1) PVRIG (generally using CHA.7.518.1H4(S241P), for example, although any outlined in WO2016/134333 (specifically including any that bind, even if they don't block) or WO2017/041004) can be used); (2) TIGIT (for example using any described herein or others in the art such as MBSA43); (3) PVR (for example using those known in the art such as SKII.4) and (4) PVRL2 (for example using those known in the art such as TX11); and (5) an isotype control antibody. FACS is done, and for each receptor, the percentage of the cells expressing the receptor relative to the control antibody is calculated. If the percentage of positive cells for PVRIG, TIGIT, PVR and PVRL2 is ≥1% for all 4 receptors, then the patient is treated with antibodies to PVRIG and TIGIT. Preferred combinations in this regard are CHA.7.518.1.H4(S241P) and CPA.9.086.

[0406] In one embodiment, antibodies containing the CDR sets from the anti-TIGIT antibody CPA.9.086 are combined with antibodies containing the CDR sets from the anti-PVRIG antibody CHA.7.518.1. In a particular embodiment, antibodies containing the VH and VL sequences from the anti-TIGIT antibody CPA.9.086 are combined with antibodies containing the VL and VL from the anti-PVRIG antibody CHA.7.518.1. In one embodiment, CPA.9.086.H4(S241P) as shown in FIG. 53 is combined with CHA.7.518.1H4(S241P) as shown in FIG. 3.

[0407] In one embodiment, antibodies containing the CDR sets from the anti-TIGIT antibody CPA.9.083 are combined with antibodies containing the CDR sets from the anti-PVRIG antibody CHA.7.518.1. In a particular embodiment, antibodies containing the VH and VL sequences from the anti-TIGIT antibody CPA.9.083 are combined with antibodies containing the VL and VL from the anti-PVRIG antibody CHA.7.518.1. In one embodiment, CPA.9.086.H4(S241P) is combined with CHA.7.518.1H4(S241P).

[0408] In one embodiment, antibodies containing the CDR sets from the anti-TIGIT antibody CPA.9.086 are combined with antibodies containing the CDR sets from the anti-PVRIG antibody CHA.7.538.1.2.H4(S241P). In a particular embodiment, antibodies containing the VH and VL sequences from the anti-TIGIT antibody CPA.9.086 are combined with antibodies containing the VL and VL from the anti-PVRIG antibody CHA.7.538.1.2.H4(S241P). In one embodiment, CPA.9.086.H4(S241P) is combined with CHA.7.538.1.2.H4(S241P).

[0409] In one embodiment, CHA.518.1.H4(S241P) is combined with an anti-TIGIT antibody as recited in the sequence listing (with reference to all the antibodies listed in FIG. 4 of U.S. Ser. No. 62/513,916), specifically CPA.9.018, CPA.9.027, CPA.9.049, CPA.9.057, CPA.9.059, CPA.9.083, CPA.9.086, CPA.9.089, CPA.9.093, CPA.9.101, CPA.9.103, CHA.9.536.1, CHA.9.536.3, CHA.9.536.4, CHA.9.536.5, CHA.9.536.6, CHA.9.536.7, CHA.9.536.8, CHA.9.560.1, CHA.9.560.3, CHA.9.560.4, CHA.9.560.5, CHA.9.560.6, CHA.9.560.7, CHA.9.560.8, CHA.9.546.1, CHA.9.546.1, CHA.9.547.2, CHA.9.547.3, CHA.9.547.4, CHA.9.547.6, CHA.9.547.7, CHA.9.547.8, CHA.9.547.9, CHA.9.547.13, CHA.9.541.1, CHA.9.541.3. CHA.9.541.4. CHA.9.541.5, CHA.9.541.6. CHA.9.541.7 and CHA.9.541.8

[0410] In one embodiment, CPA.9.086 is combined with an anti-PVRIG antibody as outlined WO2017/041004, including, but not limited to, those having a) a HC sequence SEQ ID NO:5 and LC sequence SEQ ID NO:3 (or the CDR sets contained therein) b) a HC sequence SEQ ID NO:32 and LC sequence SEQ ID NO:33 (or the CDR sets contained therein); and c) a HC sequence SEQ ID NO:32 and LC sequence SEQ ID NO:40 (or the CDR sets contained therein).

[0411] In some embodiments, the combination comprises an anti-TIGIT antibody selected from the group consisting of CPA.9.086, CPA.9.083, CHA.9.547.7, and CHA.9.547.13 and the PVRIG antibody is selected from the group consisting of CHA7.518.1 and CHA.7.538.1.2. In some embodiments, the combination comprises an anti-TIGIT antibody selected from the group consisting of CPA.9.086, CPA.9.083, CHA.9.547.7, and CHA.9.547.13 and the PVRIG antibody is CHA7.518.1. In some embodiments, the combination comprises an anti-TIGIT antibody selected from the group consisting of CPA.9.086, CPA.9.083, CHA.9.547.7, and CHA.9.547.13 and the PVRIG antibody is CHA7.538.1.2. In some embodiments, the combination comprises the anti-TIGIT antibody CPA.9.086 and the PVRIG antibody CHA7.518.1. In some embodiments, the combination comprises the anti-TIGIT antibody CPA.9.083 and the PVRIG antibody CHA7.518.1. In some embodiments, the combination comprises the anti-TIGIT antibody CHA.9.547.7 and the PVRIG antibody CHA7.518. In some embodiments, the combination comprises the anti-TIGIT antibody CHA.9.547.13 and the PVRIG antibody CHA7.518.1. In some embodiments, the combination comprises the anti-TIGIT antibody CPA.9.086 and the PVRIG antibody CHA7.538.1.2. In some embodiments, the combination comprises the anti-TIGIT antibody CPA.9.083 and the PVRIG antibody CHA7.538.1.2. In some embodiments, the combination comprises the anti-TIGIT antibody CHA.9.547.7 and the PVRIG antibody CHA7.538.1.2. In some embodiments, the combination comprises the anti-TIGIT antibody CHA.9.547.13 and the PVRIG antibody CHA7.538.1.2.

[0412] FIGS. 20-24 provides PVRIG antibodies, as disclosed in U.S. patent application Ser. No. 15/277,978, filed Sep. 27, 2016. The TIGIT antibodies of the present invention can be used in combination with the PVRIG antibodies as disclosed in these figures, as well as those disclosed throughout this application.

[0413] 5. Assessment of Treatment

[0414] Generally, the antibodies of the invention, alone or in combination (PVRIG with PD-1, TIGIT with PD-1 or TIGIT with PVRIG) are administered to patients with cancer, and efficacy is assessed, in a number of ways as described herein. Thus, while standard assays of efficacy can be run, such as cancer load, size of tumor, evaluation of presence or extent of metastasis, etc., immuno-oncology treatments can be assessed on the basis of immune status evaluations as well. This can be done in a number of ways, including both in vitro and in vivo assays. For example, evaluation of changes in immune status (e.g. presence of ICOS+ CD4+ T cells following ipi treatment) along with “old fashioned” measurements such as tumor burden, size, invasiveness, LN involvement, metastasis, etc. can be done. Thus, any or all of the following can be evaluated: the inhibitory effects of PVRIG or TIGIT on CD4⁺ T cell activation or proliferation, CD8⁺ T (CTL) cell activation or proliferation, CD8⁺ T cell-mediated cytotoxic activity and/or CTL mediated cell depletion, NK cell activity and NK mediated cell depletion, the potentiating effects of PVRIG or TIGIT on Treg cell differentiation and proliferation and Treg- or myeloid derived suppressor cell (MDSC)-mediated immunosuppression or immune tolerance, and/or the effects of PVRIG or TIGIT on proinflammatory cytokine production by immune cells, e.g., IL-2, IFN-γ or TNF-α production by T or other immune cells.

[0415] In some embodiments, assessment of treatment is done by evaluating immune cell proliferation, using for example, CFSE dilution method, Ki67 intracellular staining of immune effector cells, and 3H-Thymidine incorporation method.

[0416] In some embodiments, assessment of treatment is done by evaluating the increase in gene expression or increased protein levels of activation-associated markers, including one or more of: CD25, CD69, CD137, ICOS, PD1, GITR, OX40, and cell degranulation measured by surface expression of CD107A.

[0417] In some embodiments, the assessment of treatment is done by assessing the amount of T cell proliferation in the absence of treatment, for example prior to administration of the antibodies of the invention. If, after administration, the patient has an increase in T cell proliferation, e.g. a subset of the patient's T cells are proliferating, this is an indication that the T cells were activated.

[0418] Similarly, assessment of treatment with the antibodies of the invention can be done by measuring the patient's IFNγ levels prior to administration and post-administration to assess efficacy of treatment. This may be done within hours or days.

[0419] In general, gene expression assays are done as is known in the art. See for example Goodkind et al., Computers and Chem. Eng. 29(3):589 (2005), Han et al., Bioinform. Biol. Insights Nov. 15, 2015 9(Suppl. 1):29-46, Campo et al., Nod. Pathol. 2013 January; 26 suppl. 1:S97-S110, the gene expression measurement techniques of which are expressly incorporated by reference herein.

[0420] In general, protein expression measurements are also similarly done as is known in the art, see for example, Wang et al., Recent Advances in Capillary Electrophoresis-Based Proteomic Techniques for Biomarker Discovery, Methods. Mol. Biol. 2013:984:1-12; Taylor et al, BioMed Res. Volume 2014, Article ID 361590, 8 pages, Becerk et al., Mutat. Res 2011 Jun. 17: 722(2): 171-182, the measurement techniques of which are expressly incorporated herein by reference.

[0421] In some embodiments, assessment of treatment is done by assessing cytotoxic activity measured by target cell viability detection via estimating numerous cell parameters such as enzyme activity (including protease activity), cell membrane permeability, cell adherence, ATP production, co-enzyme production, and nucleotide uptake activity. Specific examples of these assays include, but are not limited to, Trypan Blue or PI staining, ⁵¹Cr or ³⁵S release method, LDH activity, MTT and/or WST assays, Calcein-AM assay, Luminescent based assay, and others.

[0422] In some embodiments, assessment of treatment is done by assessing T cell activity measured by cytokine production, measure either intracellularly in culture supernatant using cytokines including, but not limited to, IFNγ, TNFα, GM-CSF, IL2, IL6, IL4, ILS, IL10, IL13 using well known techniques.

[0423] Accordingly, assessment of treatment can be done using assays that evaluate one or more of the following: (i) increases in immune response, (ii) increases in activation of αβ and/or γδ T cells, (iii) increases in cytotoxic T cell activity, (iv) increases in NK and/or NKT cell activity, (v) alleviation of αβ and/or γδ T-cell suppression, (vi) increases in pro-inflammatory cytokine secretion, (vii) increases in IL-2 secretion; (viii) increases in interferon-γ production, (ix) increases in Th1 response, (x) decreases in Th2 response, (xi) decreases or eliminates cell number and/or activity of at least one of regulatory T cells (Tregs).

[0424] Assays to Measure Efficacy

[0425] In some embodiments, T cell activation is assessed using a Mixed Lymphocyte Reaction (MLR) assay as is described in the Examples. An increase in activity indicates immunostimulatory activity. Appropriate increases in activity are outlined below.

[0426] In one embodiment, the signaling pathway assay measures increases or decreases in immune response as measured for an example by phosphorylation or de-phosphorylation of different factors, or by measuring other post translational modifications. An increase in activity indicates immunostimulatory activity. Appropriate increases in activity are outlined below.

[0427] In one embodiment, the signaling pathway assay measures increases or decreases in activation of αβ and/or γδ T cells as measured for an example by cytokine secretion or by proliferation or by changes in expression of activation markers like for an example CD137, CD107a, PD1, etc. An increase in activity indicates immunostimulatory activity. Appropriate increases in activity are outlined below.

[0428] In one embodiment, the signaling pathway assay measures increases or decreases in cytotoxic T cell activity as measured for an example by direct killing of target cells like for an example cancer cells or by cytokine secretion or by proliferation or by changes in expression of activation markers like for an example CD137, CD107a, PD1, etc. An increase in activity indicates immunostimulatory activity. Appropriate increases in activity are outlined below.

[0429] In one embodiment, the signaling pathway assay measures increases or decreases in NK and/or NKT cell activity as measured for an example by direct killing of target cells like for an example cancer cells or by cytokine secretion or by changes in expression of activation markers like for an example CD107a, etc. An increase in activity indicates immunostimulatory activity. Appropriate increases in activity are outlined below.

[0430] In one embodiment, the signaling pathway assay measures increases or decreases in αβ and/or γδ T-cell suppression, as measured for an example by cytokine secretion or by proliferation or by changes in expression of activation markers like for an example CD137, CD107a, PD1, etc. An increase in activity indicates immunostimulatory activity. Appropriate increases in activity are outlined below.

[0431] In one embodiment, the signaling pathway assay measures increases or decreases in pro-inflammatory cytokine secretion as measured for example by ELISA or by Luminex or by Multiplex bead based methods or by intracellular staining and FACS analysis or by Alispot etc. An increase in activity indicates immunostimulatory activity. Appropriate increases in activity are outlined below.

[0432] In one embodiment, the signaling pathway assay measures increases or decreases in IL-2 secretion as measured for example by ELISA or by Luminex or by Multiplex bead based methods or by intracellular staining and FACS analysis or by Alispot etc. An increase in activity indicates immunostimulatory activity. Appropriate increases in activity are outlined below.

[0433] In one embodiment, the signaling pathway assay measures increases or decreases in interferon-γ production as measured for example by ELISA or by Luminex or by Multiplex bead based methods or by intracellular staining and FACS analysis or by Alispot etc. An increase in activity indicates immunostimulatory activity. Appropriate increases in activity are outlined below.

[0434] In one embodiment, the signaling pathway assay measures increases or decreases in Th1 response as measured for an example by cytokine secretion or by changes in expression of activation markers. An increase in activity indicates immunostimulatory activity. Appropriate increases in activity are outlined below.

[0435] In one embodiment, the signaling pathway assay measures increases or decreases in Th2 response as measured for an example by cytokine secretion or by changes in expression of activation markers. An increase in activity indicates immunostimulatory activity. Appropriate increases in activity are outlined below.

[0436] In one embodiment, the signaling pathway assay measures increases or decreases cell number and/or activity of at least one of regulatory T cells (Tregs), as measured for example by flow cytometry or by IHC. A decrease in response indicates immunostimulatory activity. Appropriate decreases are the same as for increases, outlined below.

[0437] In one embodiment, the signaling pathway assay measures increases or decreases in M2 macrophages cell numbers, as measured for example by flow cytometry or by IHC. A decrease in response indicates immunostimulatory activity. Appropriate decreases are the same as for increases, outlined below.

[0438] In one embodiment, the signaling pathway assay measures increases or decreases in M2 macrophage pro-tumorigenic activity, as measured for an example by cytokine secretion or by changes in expression of activation markers. A decrease in response indicates immunostimulatory activity. Appropriate decreases are the same as for increases, outlined below.

[0439] In one embodiment, the signaling pathway assay measures increases or decreases in N2 neutrophils increase, as measured for example by flow cytometry or by IHC. A decrease in response indicates immunostimulatory activity. Appropriate decreases are the same as for increases, outlined below.

[0440] In one embodiment, the signaling pathway assay measures increases or decreases in N2 neutrophils pro-tumorigenic activity, as measured for an example by cytokine secretion or by changes in expression of activation markers. A decrease in response indicates immunostimulatory activity. Appropriate decreases are the same as for increases, outlined below.

[0441] In one embodiment, the signaling pathway assay measures increases or decreases in inhibition of T cell activation, as measured for an example by cytokine secretion or by proliferation or by changes in expression of activation markers like for an example CD137, CD107a, PD1, etc. An increase in activity indicates immunostimulatory activity. Appropriate increases in activity are outlined below.

[0442] In one embodiment, the signaling pathway assay measures increases or decreases in inhibition of CTL activation as measured for an example by direct killing of target cells like for an example cancer cells or by cytokine secretion or by proliferation or by changes in expression of activation markers like for an example CD137, CD107a, PD1, etc. An increase in activity indicates immunostimulatory activity. Appropriate increases in activity are outlined below.

[0443] In one embodiment, the signaling pathway assay measures increases or decreases in αβ and/or γδ T cell exhaustion as measured for an example by changes in expression of activation markers. A decrease in response indicates immunostimulatory activity. Appropriate decreases are the same as for increases, outlined below.

[0444] In one embodiment, the signaling pathway assay measures increases or decreases αβ and/or γδ T cell response as measured for an example by cytokine secretion or by proliferation or by changes in expression of activation markers like for an example CD137, CD107a, PD1, etc. An increase in activity indicates immunostimulatory activity. Appropriate increases in activity are outlined below.

[0445] In one embodiment, the signaling pathway assay measures increases or decreases in stimulation of antigen-specific memory responses as measured for an example by cytokine secretion or by proliferation or by changes in expression of activation markers like for an example CD45RA, CCR7 etc. An increase in activity indicates immunostimulatory activity. Appropriate increases in activity are outlined below.

[0446] In one embodiment, the signaling pathway assay measures increases or decreases in apoptosis or lysis of cancer cells as measured for an example by cytotoxicity assays such as for an example MTT, Cr release, Calcine AM, or by flow cytometry based assays like for an example CFSE dilution or propidium iodide staining etc. An increase in activity indicates immunostimulatory activity. Appropriate increases in activity are outlined below.

[0447] In one embodiment, the signaling pathway assay measures increases or decreases in stimulation of cytotoxic or cytostatic effect on cancer cells as measured for an example by cytotoxicity assays such as for an example MTT, Cr release, Calcine AM, or by flow cytometry based assays like for an example CFSE dilution or propidium iodide staining etc. An increase in activity indicates immunostimulatory activity. Appropriate increases in activity are outlined below.

[0448] In one embodiment, the signaling pathway assay measures increases or decreases direct killing of cancer cells as measured for an example by cytotoxicity assays such as for an example MTT, Cr release, Calcine AM, or by flow cytometry based assays like for an example CFSE dilution or propidium iodide staining etc. An increase in activity indicates immunostimulatory activity. Appropriate increases in activity are outlined below.

[0449] In one embodiment, the signaling pathway assay measures increases or decreases Th17 activity as measured for an example by cytokine secretion or by proliferation or by changes in expression of activation markers. An increase in activity indicates immunostimulatory activity. Appropriate increases in activity are outlined below.

[0450] In one embodiment, the signaling pathway assay measures increases or decreases in induction of complement dependent cytotoxicity and/or antibody dependent cell-mediated cytotoxicity, as measured for an example by cytotoxicity assays such as for an example MTT, Cr release, Calcine AM, or by flow cytometry based assays like for an example CFSE dilution or propidium iodide staining etc. An increase in activity indicates immunostimulatory activity. Appropriate increases in activity are outlined below.

[0451] In one embodiment, T cell activation is measured for an example by direct killing of target cells like for an example cancer cells or by cytokine secretion or by proliferation or by changes in expression of activation markers like for an example CD137, CD107a, PD1, etc. For T-cells, increases in proliferation, cell surface markers of activation (e.g. CD25, CD69, CD137, PD1), cytotoxicity (ability to kill target cells), and cytokine production (e.g. IL-2, IL-4, IL-6, IFNγ, TNF-a, IL-10, IL-17A) would be indicative of immune modulation that would be consistent with enhanced killing of cancer cells.

[0452] In one embodiment, NK cell activation is measured for example by direct killing of target cells like for an example cancer cells or by cytokine secretion or by changes in expression of activation markers like for an example CD107a, etc. For NK cells, increases in proliferation, cytotoxicity (ability to kill target cells and increases CD107a, granzyme, and perforin expression), cytokine production (e.g. IFNγ and TNF), and cell surface receptor expression (e.g. CD25) would be indicative of immune modulation that would be consistent with enhanced killing of cancer cells.

[0453] In one embodiment, γδ T cell activation is measured for example by cytokine secretion or by proliferation or by changes in expression of activation markers.

[0454] In one embodiment, Th1 cell activation is measured for example by cytokine secretion or by changes in expression of activation markers.

[0455] Appropriate increases in activity or response (or decreases, as appropriate as outlined above), are increases of at least about 5%, 10%, 20%, 30%, 40%, 50%, 60%, 70%, 80%, 90%, 95% or 98 to 99% percent over the signal in either a reference sample or in control samples, for example test samples that do not contain an anti-PVRIG antibody of the invention. Specific increases in activity are depicted in FIGS. 27 to 34. For example, with regard to increases in T cell proliferation, CHA.7.518.1.H4(S241P) shows an increase of about 60% and CHA.7.538.1.2.H4(S241P) shows an increase of 47%; relevant increases are shown in either T cell proliferation or IFN-γ of from about 10 to 70% with from about 20 to 60% also finding use.

[0456] Similarly, increases of at least one-, two-, three-, four- or five-fold as compared to reference or control samples show efficacy.

### XII. EXAMPLES

[0457] Reference is made to PCT/US2016/18809, filed Feb. 19, 2016, entitled “PVRIG ANTIBODIES AND METHODS OF TREATMENT”, expressly incorporated herein by reference in its entirety, and in particular for the incorporation of Examples 1-5, 7-8, 11-13, 16-20 and 26-28, and the accompanying figures.

### A. Example 1

### Surface Plasmon Resonance Studies of PVR, PVRL2, and PVRL3 Binding to PVRIG, DNAM, and TIGIT

### Materials and Methods

[0458] All experiments were performed using a ProteOn XPR 36 instrument at 22° C.

[0459] Step 1: A high density goat anti-human fc polyclonal antibody surface (Invitrogen H10500) was prepared over all six lanes of a GLC chip using a ProteOn XPR 36 biosensor. The activation step for the anti-human fc surface occurred in the horizontal flow direction while the immobilization step for the high density pAb occurred in the vertical flow direction. The blocking step occurred in both the vertical and horizontal positions so that the horizontal “interspots” could be used as reference surfaces. An average of ˜4400 RU of goat anti-human pAb was immobilized on each lane.

[0460] Step 2: For each cycle, three different lots of human PVRIG fusion protein (human fc, GenScript lots 451, 448, 125), human DNAM-1 fusion protein (human fc, R&D Systems), human TIGIT fusion protein (human fc, R&D Systems), and a control human IgG (Synagis) were each captured over a different vertical lane for two minutes at a concentration of 2 μg/mL. PVR, two lots of PVRL2, and PVRL3 were each injected in the horizontal flow direction at six different concentrations over all six captured ligands at different ligand capture cycles. The injections were two minutes followed by 10 minutes of dissociation at a flow rate of 50 μL/min. The PVR concentration range was 1.4 nM-332 nM in a 3-fold dilution series, both lots of PVRL2 were injected at a concentration range of 1.3 nM-322 nM in a 3-fold dilution series, and PVRL3 was injected at a concentration range of 1.4 nM-334 nM in a 3-fold dilution series. All protein reagents were prepared in running buffer which was degassed PBS buffer with 0.05% Tween 20 and 0.01% BSA added. The anti-human fc capture surfaces were regenerated with two 30-second pulses of 146 mM phosphoric acid after each cycle.

[0461] Step 3: Sensorgram data of the analytes binding to each captured ligand were processed and double-referenced using ProteOn Manager version 3.1.0.6 making use of interspot referencing and a pre-blank injection identical to the analyte injections.

### Results

[0462] a) PVR: Binds weakly to captured DNAM-1 and TIGIT and shows no binding to all three lots of PVRIG and the control IgG. Not enough information was generated to estimate the KD of the PVR interactions with DNAM-1 and TIGIT (data not shown).

[0463] b) PVRL2: Both lots of PVRL2 showed binding to all three lots of PVRIG and to DNAM-1 but minimal or no binding to TIGIT and no binding to the control IgG. Sensorgrams showed complex kinetics, therefore binding constants could not be estimated (data not shown).

[0464] c) PVRL3: Showed minimal binding to TIGIT and did not bind the other proteins (data not shown).

### B. Example 2

### Effect of PVRIG Knock Down (KD) and Anti-PVRIG Antibody on Human Melanoma Specific TILs Function

[0465] The aim of these assays is to evaluate the functional capacity of PVRIG in human derived TILs, as measured by activation markers and cytokine secretion, upon co-culture with melanoma target cells.

### 1. Example 2(1)

[0466] The effect of anti-PVRIG antibody (CPA.7.021), which has been shown to block the interaction of PVRIG and PVRL2, alone or in combination with other antibodies (e.g anti-TIGIT, Anti-DNAM1) was evaluated. PD1 was used as a benchmark immune-checkpoint for the knock down (siRNA) studies.

[0467] Materials and Methods: TILs: Tumor-infiltrating lymphocytes (TILs) from three melanoma patients were used (1) TIL-412-HLA-A2-Mart1 specific, (2) TIL-F4-HLA-A2-gp100 specific, and (3) TIL-209-HLA-A2-gp100 specific. TILs were thawed in IMDM (BI, 01-058-1A) full medium supplemented with 10% human serum (Sigma, H3667)+1% Glutamax (Life technologies, 35050-038)+1% Na-Pyruvate (Biological Industries, 03-042-1B)+1% non-essential amino acids (Biological Industries, 01-340-1B)+1% Pen-Strep (Biological Industries, 03-031-1B)+300 U/ml of rhIL2 (Biolegend, 509129).

[0468] Tumor cell lines: Human melanoma cells Mel-624 express MART-1 and gp-100 antigens in the context of MHC-I haplotype HLA-A2. Cells were cultured in complete DMEM medium supplemented with 10%, 25 mM HEPES buffer, 1%, and 1% Pen-Strep.

[0469] Knock down in TILs: Knock-down (KD) of human PVRIG and human PD1 in TILs was done using 100 pmol of Dharmacon ON-TARGETplus human PVRIG siRNA—SMARTpool (L-032703-02) or Human PD1 siRNA—SMARTpool (L-004435) or non-targeting siRNA (D-001810-01-05). siRNA were electroporated to TILs (AMAXA, program X-005). Electroporation was done on resting TILs cultured in full IMDM supplemented with IL-2 24 hr post thawing. After the electroporation TILs were seeded in 96 well TC plate to recover for 24 hr. After 24 hr, cells were harvested and stained with viability dye (BD Horizon; Cat #562247, BD biosciences), washed with PBS and stained with anti-human PVRIG—CPA.7.021 (CPA.7.021 IgG2 A647, 7.5 ug/ml) or with anti-human PD-1 (Biolegend, #329910 AF647, 5 ug/ml) in room temperature for 30 min. isotype control used are synagis (IgG2 A647, 7.5 ug/ml) and mouse IgG1 (Biolegend #400130 A647, 5 ug/ml) respectively. All samples were run on a MACSQuant analyzer (Miltenyi) and data was analyzed using FlowJo software (v10.0.8).

[0470] Co-culture of TILs with 624 melanoma cells: siRNA electroporated TILs were harvested and seeded in 96 TC plate 5×104/well. Mel-624 cells were harvested as well and seeded in 1:1/1:3 E:T ratios in co-culture. The plate was incubated overnight (18 hr) in 37° C., 5% CO2.

[0471] To assess the effect of anti-PVRIG antibody (CPA.7.021), anti-TIGIT (Clone 10A7; from Genentech US Patent Application No. US 2009/0258013) and anti-DNAM1 (clone DX11, first described in Shibuya et al Immunity Volume 4, Issue 6, 1 Jun. 1996, Pages 573-581; BD Biosciences; Mouse anti-human DNAM-1 Clone DX11, Cat No. 559787) on melanoma specific TIL activity, TILs (1×105 cells/well) were pre-incubated with tested antibodies or relevant isotype controls in mono-treatment (10 μg/mL) or in combination-treatment (final 10 μg/mL for each) prior to the addition of 624 Melanoma target cells at a 1:1 Effector:Target ratio. The plate was incubated overnight (18 hr) in 37° C., 5% CO2.

[0472] Assessment of TILs activation: 16 hours post co-culture, cells were stained with viability dye (BD Horizon; Cat #562247, BD biosciences), washed with PBS and exposed to Fc blocking solution (cat #309804, Biolegend), followed by surface staining with anti-CD8a (Cat #301048, Biolegend) and anti-CD137 (Cat #309804, Biolegend) in 4° C. for 30 min. All samples were run on a MACSQuant analyzer (Miltenyi) and data was analyzed using FlowJo software (v10.0.8). Culture supernatants were collected and analyzed for cytokine secretion by CBA kit (Cat #560484, BD).

### Results

[0473] PVRIG Knock-Down in TILs: TIL MART-1 and TIL F4 were cultured 24 hr with IL-2. 100 pmol of ON-TARGETplus human PVRIG siRNA—SMART pool (L-032703-02) or Human PD1 siRNA—SMARTpool (L-004435) or non-targeting siRNA (D-001810-01-05) were electroporated to TILs (AMAXA, program X-005). Detection of PVRIG or PD-1 was performed 24 hr post electroporation (and prior to co-culture). Cells were stained for viability dye followed by 30 min RT incubation with anti PVRIG or anti PD-1. The percentage of KD population is indicated in FIG. 82 of U.S. Ser. No. 15/048,967, incorporated by reference herein.

[0474] Functional assay using knocked down TILs: Human TILs, cultured for 24 hours with IL2 were electroporated with siRNA encoding for human PVRIG or PD-1 or scrambled sequence as control. TILs were tested for PVRIG and PD-1 expression 24 hr post electroporation. ˜80% knock down of PVRIG and ˜50% knock down of PD-1 compared to scrambled-electroporated TILs was observed as demonstrated in FIG. 82 of U.S. Ser. No. 15/048,967, incorporated by reference herein.

[0475] KD TILs were cultured with Mel-624 cells in 1:1 or 1:3 E:T for 18 hr and were stained for the expression of CD137. Elevated levels of activation marker CD137 were shown in TIL MART-1 electroporated with PVRIG siRNA, similarly to TILs that were electroporated with PD-1 siRNA, compared to control scrambled siRNA (as demonstrated in FIG. 83A of U.S. Ser. No. 15/048,967, incorporated by reference herein). Co-culture supernatant was collected and tested for the presence of secreted cytokines. TILs that were electroporated with PVRIG siRNA show a significant increase in IFNγ and TNF levels compared to control SCR siRNA. A similar effect was shown in TILs that were electroporated with PD-1 siRNA (as demonstrated in FIG. 83B-C of U.S. Ser. No. 15/048,967, incorporated by reference herein).

[0476] The same trend of increase in activation levels was observed in TIL F4. Co-culture of PVRIG siRNA electroporated TIL F4 with Mel-624 in 1:3 E:T led to increased levels of CD137 surface expression as well as increased secretion of IFNγ in co-culture supernatant as shown in FIGS. 84A and 84B of U.S. Ser. No. 15/048,967, incorporated by reference herein. Similar trends were observed in TILs that were electroporated with PD-1 siRNA.

[0477] Functional Assay using Blocking Abs:

[0478] In vitro monotherapy and combo therapy of anti-PVRIG and anti-TIGIT: 209 TILs were cultured with Mel-624 cells in 1:1 E:T for 18 hr. Co-culture supernatant was collected and tested for the presence of secreted cytokines. Treatment with anti TIGIT did not affect IFNγ or TNF secretion levels. However, an increase in IFNγ and TNF levels was observed when anti TIGIT and anti PVRIG were added to co-culture in combination (FIG. 8A-B).

[0479] In vitro monotherapy and combo therapy of anti-PVRIG and anti-TIGIT: 209 TILs were cultured with Mel-624 cells in 1:1 E:T for 18 hr. TILs were stained for surface expression of activation marker CD137 and showed reduced level of expression upon treatment with anti DNAM-1. Co-culture supernatant was collected and tested for presence of secreted cytokines. Treatment of anti DNAM-1 mediated a trend to increase secreted cytokines IFNγ and TNF. Treatment with anti DNAM-1 and anti PVRIG in combination partially reversed the effect on CD137 expression (FIG. 9C) and enhanced the effect on cytokine secretion IFNγ and TNF (FIG. 9A-B). MART-1 TILs were cultured with Mel-624 cells in 1:1 E:T for 18 hr. Co-culture supernatant was collected and tested for the presence of secreted cytokines. Treatment with anti DNAM-1 reduced CD137 surface expression on TILs and also the secreted cytokines IFNγ and TNF. Treatment with anti DNAM-1 and anti PVRIG in combination partially reversed these effects (FIG. 9D-F).

[0480] Summary and conclusions: PD1 KD improved TIL activity, as measured by IFNγ and secretion in F4 and MART-1 TILs. An increase (˜20%) of IFNγ and TNF secretion was observed upon PVRIG KD in MART-1 TILs compared to control siRNA. The same trend was observed in CD137 expression upon co-culture with 624 Melanoma cells on F4 TILs.

[0481] Treatment of anti-TIGIT did not affect IFNγ or TNF secretion levels from TILs co-cultured with 624 Mels, however, an increase in IFNγ and TNF levels was observed when anti TIGIT and anti PVRIG (CPA.7.021) were added to co-culture in combination.

[0482] Anti DNAM-1 treatment reduced TIL-MART-1 activation manifested by reduced CD137 and cytokine secretion and anti-PVRIG (CPA.7.021) could partially reverse this effect in combo treatment with DNAM-1 Ab. In TIL 209, IFNγ and TNF secretion levels were slightly elevated (˜10%) with anti DNAM-1, and an increase in IFNγ and TNF levels (˜40% and 30%, respectively) was observed when anti DNAM1 and anti PVRIG (CPA.7.021) were added to co-culture in combination. Collectively, our results showed that PVRIG is a new co-inhibitory receptor for PVRL2.

### 2. Example 2(2)

[0483] The effect of additional anti-PVRIG antibodies (CHA.7.518.1.H4(S241P); CHA.7.524; CHA.7.530; CHA.7.538), which have been shown block the interaction of PVRIG and PVRL2, alone or in combination with other antibodies (e.g anti-TIGIT, PD1) on TIL-209, TIL-412 and TIL-463-F4 activity upon co-culture with 624 melanoma cell line was evaluated.

[0484] Functional antibodies used in this assay were anti hPVRIG hybridoma Abs (mIgG1 backbone)—CHA.7.518.1.H4(S241P); CHA.7.524; CHA.7.530; CHA.7.538 (M1 lot #30816); anti hTIGIT (mIgG1 backbone)—clone 10A7 (Genescript), anti-TIGIT clone MBSA43 (e-biosciences) and mIgG1 (cat #400166, MOPC-21 clone, Biolegend)

[0485] Co-culture of TIL and 624 mels: TILs were thawed and cultivated as described in 2.1 24 hr prior to co-culture. Abs tested were added in mono-treatment (10 ug/mL) or in combination with anti TIGIT (20 ug/mL) to seeded TILs and incubated (in total 100 uL) for 1 hr in 37° C., 5% CO2. Mel-624 cells were harvested and seeded in 1:3 Effector:Target ratio in co-culture with TILs. Plate was incubated overnight (18 hr) in 37° C., 5% CO2.

[0486] Assessment of TILs functional capacity: T cell activity was assessed based on detection of IFNγ in co-culture supernatants. Culture supernatants were collected and tested for cytokines by CBA kit (Cat #560484, BD) or by MAGPIX human IFNγ/TNFα kit. Two tailed unpaired T-tests were calculated. P<0.05 was referred to as statistically significant.

### Results

[0487] Functional assay using TILs and melanoma cells in the presence of anti PVRIG hybridoma Abs: Human TILs, cultured for 24 hours with IL2 were co-cultured with Mel-624 cells in 1:3 E:T for 18 hr and tested for cytokine secretion. FIG. 31 described a representative experiment out of 5-6 performed. TILs were co-cultured with melanoma cells 624 in the presence of anti-TIGIT or anti-PVRIG Abs (blue) or in combination of anti-TIGIT and anti PVRIG (green) and tested for IFNγ/TNF secretion. In this experiment, all 4 anti-PVRIG Abs mono treatments increased (20-30%) IFNγ secretion in 2 out of 3 TILs tested (TIL-209 and TIL463-F4) while in combination with anti-TIGIT all anti-PVRIG Abs CHA.7.518.1.H4(S241P), CHA.7.530, CHA.7.538 increased IFNγ secretion compared to anti-TIGIT treatment alone.

[0488] The effect of Ab CHA.7.518.1.H4(S241P) was found statistically significant across experiments in TIL 463-F4-gp100 across 5 experiments as mono and in combination with anti-TIGIT (FIG. 9E, G). Combo treatment of anti-PVRIG Ab CHA.7.518.1.H4(S241P) effect was also statistically significant in TIL 209 (FIG. 9C). Combo treatment effect of anti PVRIG Ab CHA.7.538 was found statistically significant in TIL 463-F4-gp100 (FIG. 9F).

[0489] Summary and conclusions: In the experimental systems described herein we observed an effect of anti PVRIG on TILs in response to target melanoma cells as seen by changes in IFNγ secretion. Anti PVRIG Hybridoma Abs tested mediated an increase in IFNγ secretion compared to relevant isotype control. Ab CHA.7.518.1.H4(S241P) seems to have an advantage in mediating an increase in IFNγ secretion as a mono-treatment and compared to other aPVRIG Abs tested however the magnitude of this effects varies between different TILs. This effect is enhanced in combination with anti-TIGIT treatment.

### 3. Example 2(3)

[0490] The aim is to evaluate the functional activity of anti-human PVRIG antibodies (CHA.7.518.1.H4(S241P); CHA.7.544; or CHA.7.538) on human TILs activity upon co-culture with peptide-pulsed CHO-S cells stably co-expressing HLA-A2, b2 microglobulin (B2M) and PVRL2.

[0491] TILs from resected metastases of three melanoma patients were used: TIL-412-HLA-A2-Mart1(26-35) specific, TIL-463-F4-HLA-A2-gp100(209-217) specific, TIL-463-F5-HLA-A2-gp100(209-217) specific, and TIL-209-HLA-A2-gp100(209-217) specific.

[0492] TILs were thawed in IMDM full medium supplemented with 10% human serum+1% Glutamax+1% Na-Pyruvate+1% non-essential amino acids+1% Pen-Strep+300 U/ml of rhIL2 (Biolegend, 589106).

[0493] CHO-S cells (target cells) were stably transduced with a lentivirus expressing HLA-A2/B2M (lentivirus vector cat #CD515B-1-SBI, system biosciences) and grown under 600 ug/ml of hygromycin B selection in CD CHO medium (Cat #10743-011) supplemented with 8 mM GlutaMax 1% and 1% Pen/Strep. HLA-A2/B2M expressing cells were then cloned by limiting dilution. The 3E8 clone with high HLA-A2 and B2M expression was then transduced with a lentivirus expressing human PVRL2 (lentivirus vector cat #CD510B-1-SBI, system biosciences), and grown under 6 ug/ml puromycin selection.

[0494] In the experimental system described herein (depicted in FIG. 35), gp100 or MART-1-reactive TILs that endogenously express TIGIT, DNAM-1 and PVRIG FIG. 37) were co-cultured with peptide-pulsed CHO-S HLA-A2/B2M/PVRL2 cells.

[0495] Functional antibodies used in this assay were anti human PVRIG; Ab 461 (Aldeveron)—referred to 544 in this example, anti human PVRIG chimera Ab (hIgG4 back bone)—CHA.7.538; CHA.7.518 (referred to c538 and c518 in this example, meaning that the variable heavy and light regions from 7.538 and 7.518 were fused to human IgG4 constant regions anti human TIGIT (mIgG1 backbone) clone MBSA43 (e-biosciences), mIgG1 (biolegend) and hIgG4 (biolegend).

[0496] TILs were thawed and cultured as described herein for 24 hr prior to co-culture with target cells. The tested antibodies were added in mono-treatment (10 ug/mL) or in combination with anti TIGIT (total 20 ug/mL) to seeded TILs and incubated (in total 100 uL) for 30 min in 37° C., 5% CO2. CHO-S cells were harvested and pulsed with 0.1 or 0.5 ug/ml of gp-100 (gp100209-217) or with 20 ug/ml of MART-126-35 peptides, for 1 hour at 37° C. in Opti-MEM™ reduced serum media. Following tree washes with Opti-MEM™ reduced serum media, peptide-pulsed target cells were over-night (18 hr) co-cultured with TILs at Effector:Target ratio of 1:3 (33k:100k).

[0497] Assessment of TILs functional capacity: The effect of anti PVRIG antibodies (10 ug/ml) as mono treatment or as combo treatment with anti TIGIT on TILs activity was assessed using measurement of cytokines secretion from over-night co-culture supernatants using Combined Bead Array (CBA) kit (Cat #560484, BD). All samples were acquired in MACSQuant analyzer (Miltenyi) and data was analyzed using FlowJo software (v10.0.8).

[0498] Dose response of anti PVRIG antibodies: The effect of anti PVRIG antibodies c518, c538 (or hIgG4 isotype control) dose response was tested on the described assay in an antibodies concentration of 30, 10, 3, 1, 0.3, 0.1 and 0.03 ug/ml. Two tailed unpaired T-tests were calculated. P<0.05 was referred to as statistically significant.

### Results

[0499] Effect of anti PVRIG antibodies on TILs activity upon co-culture with CHO-S HLA-A2/B2M cells expressing PVRL2: The effect of three anti PVRIG antibodies (544, c538 and c518) on the activity of four different TILs (412, 463, 462 and 209) from two different experiments is summarized in FIG. 37. Ab served as non-blocker Ab control. The detailed results of the experiments are presented in FIG. 39. Treatment with 544, c538 and c518 antibodies increased the levels of IFN secretion from TILs (on average of 6%, 28% and 23%, respectively) compared to treatment with isotype antibody. Increased IFN secretion was detected in TILs treated with c538 or c518 compared to 544, the non-blocker control. No significant difference was found between treatments with c538 to c518 Abs. Treatment with anti TIGIT increased IFN secretion from TILs (on average of 49%) compared to isotype. The combo treatment of c518 and c538 with anti TIGIT induced additive effect in IFN secretion from TILs, but the combo effect was not statistically significant compare to treatment with mono treatment of TIGIT.

[0500] Effect of anti-PVRIG antibodies dose response on TILs functional capacity: The effect of adding anti PVRIG antibodies (c538 and c518) in dose response on the activity of TILs F4 and 209 was evaluated (FIG. 80). The EC50 of c518 and c538 antibodies is in the single digit nM compared to isotype control as measured by the effect of TNFα secretion from the TILs.

[0501] Summary and conclusions: In the experimental system described herein we observed effect of anti PVRIG antibodies on TILs activity in response to co-culture with peptide-pulsed CHO-S HLA-A2/B2M target cells over-expressing PVRL2. The anti PVRIG antibodies that were tested mediated an increased secretion of IFN and TNF from TILs compared to the relevant isotype control. Antibodies c518 and c538 have statistical significant advantage (p-0.0063 and p-0.0034 respectively) on TIL activity, as manifested by IFN secretion, as compared to 544, which is a non-blocker antibody of PVRIG (based on competition experiment clone on PVRIG expressing cells). Both c518 and c538 antibodies had an additive effect with anti TIGIT antibody (no statistical significant).

### 4. Example 2(4)

[0502] The aim of this example was to evaluate the functional capacity of PVRIG in human derived TILs as measured by cytokine secretion upon co-culture with melanoma target cells. The effect of anti-PVRIG antibodies (CHA.7.518.1.H4(S241P); CHA.7.524; CHA.7.530; CHA.7.538), which have been shown block the interaction of PVRIG and PVRL2, alone or in combination with other antibodies (e.g anti-TIGIT, PD1) was evaluated.

[0503] Purified CD3+ T cells were obtained using Rossetesep human T cell enrichment cocktail kit (Stem cell technologies) on buffy coat blood samples. Cells were thawed and labeled with CFSE (Moleculare probes) to be able to track proliferation in co-culture.

[0504] CHO-S-OKT3 cells: CHO-S cells were transduced with CD5L-OKT3-scFv-CD14 in CD710B-1 (SBI, cat #CS965A-1, lot #151014-005, 1.40×108 ifus/ml). Cells were cultured in the presence of CD CHO (Gibco, life technologies Cat #10743-011) with addition of 8 mM GlutaMax and 6 μg/ml puromycin. Surface OKT3 levels were evaluated by flow cytometry using PE-goat anti-mouse IgG F(ab)′2 at 1:200 dilution (Jackson Immunoresearch, cat #115-116-146). CHO-S-OKT3 cells were then transiently transfected with human PVRL2 (delta isoform) or empty vector using Amaxa electroporation system (Lonza, Walkersville, Md., USA) according to the manufacturer's instructions. 5 ug of pcDNA3.1 plasmid (empty vector or hPVRL2) per 2×106 cells in Ingenio™ Electroporation Solution (Minus, Cat #MC-MIR-50115) and pulse-program U-024 were used. Expression of PVRL2 on transfected CHOS-S-OKT3 cells was evaluated by flow cytometry using anti-PVRL2 Ab (cat #337412, Biolegend).

[0505] The functional antibodies used in this assay were Anti hPVRIG hybridoma Abs (mIgG1 backbone)—CHA.7.518.1.H4(S241P); CHA.7.524; CHA.7.530; CHA.7.538, anti-TIGIT clone MBSA43 (e-biosciences) and mIgG1 (cat #400166, MOPC-21 clone, Biolegend).

[0506] Co-culture of CD3 T cells and CHO-OKT3 cells: CD3+ T cells were thawed and immediately labeled with CFSE. In parallel CHO-S-OKT3-PVRL2 cells were harvested and treated with Mitomycin-C for 1 hr in 37° C., washed and added to co-culture with T cells in 1:5 E:T (1×105 T cells and 2×104 CHO-OKT3-PVRL2 or mock). Abs were added in mono-treatment (10 ug/mL) or in combination with anti TIGIT (10 ug/mL) and co-culture plates were incubated 37° C., 5% CO2 for 5 days. After 5 days cells were harvested and T cell proliferation wad analyzed by FACS gating on CD4 and CD8 sub-populations.

[0507] Effect of anti-PVRIG antibodies in CHOS-OKT3 co-culture assay: CFSE-labeled T cells were stimulated with stimulator cells (CHO cells expressing membrane-bound anti-CD3 mAb fragments). CHOS-stimulator cells expressing human PVRL2 and control stimulator cells (empty vector) treated with mitomycin C (50 ug/ml for 1 h) before co-cultured with CFSE-labeled human T cells at the ratio of 1:5. After 5 days at 37° C. and 5.0% CO2, the effect of anti-PVRIG antibodies (10 ug/ml) on T cell proliferation (CFSE dilution) and cytokine secretion (ELISA or TH1/2/17 CBA kits) in culture supernatants was assessed. All samples were acquired in MACSQuant analyzer (Miltenyi) and data was analyzed using FlowJo software (v10.0.8). Culture supernatants were collected and analyzed for cytokine secretion by CBA kit (Cat #560484, BD).

### Results

[0508] Effect of anti-PVRIG antibodies on PVRL2 over-expression in CHOS-OKT3 assay: CHOS-OKT3 overexpressing PVRL2 or mock (empty vector) cells were co-cultured with CD3+ cells and the effect of anti-PVRIG antibodies as mono treatment or in combination with anti-TIGIT on T cell proliferation and cytokine secretion was tested (FIG. 40). After 5 days cells were harvested and analyzed for CFSE dilution. In parallel co-culture supernatant was collected and tested for cytokine secretion. FIG. 41 shows the effect of anti-PVRIG Abs in responder vs. non responder donor. The effect of various anti-PVRIG Abs on T cell proliferation as mono treatment in combination with anti-TIGIT were evaluated. While some anti-PVRIG Ab enhance T cell proliferation, no additive effect with anti-TIGIT antibody was observed in this system (FIG. 42). These effects were not seen when the Abs were tested in co-culture of CD3+ cells with mock (empty vector transfected) CHO-S cells (data not shown).

[0509] Total of 10 donors were tested and 5 out of 10 donors responded to anti-PVRIG Abs. Treatment of Ab CHA.7.518.1.H4(S241P) consistently resulted in enhanced IFNγ secretion ranging between 20-50% across 5 responder donors tested while treatment with other Abs did not demonstrate a dear trend (FIG. 43). Similar effects were observed in CD8+ cells proliferation. Effect of Abs treatment are summarized in FIG. 44.

### C. Example 3

### Effect of Anti-PVRIG Antibody on Human Melanoma Specific TILs Function in Combination with Anti-TIGIT and Anti-PD1 Antibodies

### 1. Example 3(1)

### Materials and Methods

[0510] TILs: Tumor-infiltrating lymphocytes (TILs) from three melanoma patients were used: (1) TIL-412-HLA-A2-Mart1 specific, (2) TIL-F4-HLA-A2-gp100 specific and (3) TIL-209-HLA-A2-gp100 specific.

[0511] TILs were thawed in IMDM (BI, 01-058-1A) full medium supplemented with 10% human serum (Sigma, H3667)+1% Glutamax (Life technologies, 35050-038)+1% Na-Pyruvate (Biological Industries, 03-042-1B)+1% non-essential amino acids (Biological Industries, 01-340-1B)+1% Pen-Strep (Biological Industries, 03-031-1B)+300 U/ml of rhIL2 (Biolegend, 509129).

[0512] Tumor cell lines: Human melanoma cells Mel-624 express MART-1 and gp-100 antigens in the context of MHC-I haplotype HLA-A2. Cells were cultured in complete DMEM medium (Biological Industries, 01-055-1A) supplemented with 10% FBS (BI, 04-127-1A), 25 mM HEPES buffer (BI, 03-025-1B), 1% Glutamax (Life technologies, 35050-038), and 1% Pen-Strep (Biological Industries, 03-031-1B).

[0513] Co-culture of TILs with 624 melanoma cells in the presense of anti-PVRIG, anti-TIGIT and PD1 blocking antibodies: To assess the effect of anti-PVRIG antibody (CPA.7.021), anti-TIGIT (Clone 10A7) and anti-PD1 (mAb 1B8, Merck) on melanoma specific TIL activity, TILs (3×104 cells/well) were pre-incubated with tested antibodies or relevant isotype controls in mono-treatment (10 μg/mL) or in combination-treatment (final 10 μg/mL for each) prior to addition of 624 Melanoma target cells at 1:3 Effector:target ratio. Plate was incubated overnight (18 hr) in 37° C., 5% CO2.

[0514] Assessment of TILs activation: Culture supernatants were collected and analyzed for cytokine secretion by CBA kit (Cat #560484, BD).

[0515] In vitro monotherapy anti-PVRIG and combo-therapy of with anti-TIGIT and PD1 blocking antibodies: F4 TILs (gp100 specific) were cultured with Mel-624 cells in 1:3 E:T for 18 hr. Co-culture supernatant was collected and tested for presence of secreted cytokines. Treatment of anti-TIGIT or anti-PD1 did not affect IFNγ or TNF secretion levels. However, an increase in IFNγ and TNF levels was observed when anti TIGIT or anti-PD1 in combination with anti PVRIG were added to co-culture in combination (FIG. 10A-B).

[0516] Treatment of anti-PVRIG, anti-TIGIT and PD1 alone did not affect IFNγ or TNF secretion levels from TILs co-culture with 624 Mels, however, an increase in IFNγ and TNF levels was observed when anti-TIGIT or anti-PD1 antibodies were added in combination with anti PVRIG (CPA.7.021). The presented data suggest that there is synergestic effect for combinatory therapy with anti-TIGIT or anti-PD1 antibodies.

### 2. Example 3(2)

[0517] Again, the ability of anti-PVRIG antibodies to enhance CD4+ and CD8+ T cell function in combination with an anti-TIGIT antibody in a primary in vitro cell-based assay was assessed.

[0518] CHO-S OKT3 assay: The CHO-S OKT3 assay was utilized to determine whether the combination of a humanized PVRIG antibody, CHA.7.518.1.H4(S241P), and a commercially available anti-TIGIT antibody could increase T cell proliferation, and cytokine secretion greater than a single anti-PVRIG or anti-TIGIT antibody treatment. The target cells used in the co-culture assay were the Chinese hamster ovary cell line, CHO-S (ATCC), stably overexpressing the single chain variable fragment of the anti-human CD3 antibody Clone OKT3 (abbreviated as OKT3), and human PVRL2 (abbreviated as hPVRL2). CHO-S OKT3 parental cells were grown in serum-free CD-CHO medium supplemented with 40 mM glutamax, penicillin/streptomycin, and 6 μg/ml puromycin. CHO-S OKT3 hPVRL2 cells were grown in serum-free CD-CHO medium supplemented with 40 mM glutamax, penicillin/streptomycin, 6 μg/ml puromycin, and 600 μg/ml hygromycin B.

[0519] Primary CD3+ and CD8+ T cells were isolated from healthy human donors using the RosetteSep™ human CD3+ T cell enrichment cocktail (Stemcell Technologies), and the human CD8+ microbeads (Miltenyi Biotec), respectively, and frozen in liquid nitrogen. On the day of the co-culture assay, CD3+ or CD8+ T cells were thawed, counted, and labeled with 1 μM CFSE (Life Technologies) for 10 minutes at 37° C. Following this incubation, T cells were washed and resuspended in complete medium containing RPMI, supplemented with 10% heat-inactivated FBS, glutamax, penicillin/streptomycin, non-essential amino acids, sodium pyruvate, and 50 μM @-mercaptoethanol. CHO-S OKT3 hPVRL2 cells were harvested from culture, and treated with mitomycin C for 1 hour at 37° C. with periodic mixing. After the incubation, the target cells were thoroughly washed, counted, and resuspended in complete RPMI medium. The assay was set up with a 5:1 ratio of T cells (100,000) to target cells (20,000). The target cells, T cells, and 10 μg/ml of each antibody treatment were added together in a 96-well U-bottom plate (Costar), and incubated for either 3 days (CD8+ T cells), or 5 days (CD4+ T cells) at 37° C. The antibody treatments included human CHA.7.518.1.H4(S241P) IgG4 alone, a human IgG4 isotype control combined with the mouse anti-human TIGIT (Clone MBSA43, eBioscience), and a combination of CHA.7.518.1.H4(S241P) and anti-TIGIT (Clone MBSA43). In addition, the activity of the mouse anti-human DNAM-1 IgG1 (Clone DX11, BioLegend), mouse IgG1 isotype control (Clone MOPC21, BioLegend), and a human IgG4 isotype control was also assessed.

[0520] After the 3 or 5-day incubation period, co-culture supernatants were analyzed for secreted cytokines, including IL-2, IL-4, IL-5, IL-6, IL-9, IL-10, IL-13, IL-17A, IL-17F, IL-21, IL-22, TNFα, and IFNγ, with the cytometric bead array (CBA) human Th1/Th2/Th17 cytokine kit (BD Biosciences), or with the LEGENDplex™ Human Th cytokine kit (BioLegend). T cell proliferation was measured by staining CD4+ or CD8+ T cells with the LIVE/DEAD fixable aqua dead cell stain kit (ThermoFisher Scientific), anti-CD4 antibody (Clone RPA-T4, BioLegend), and anti-CD8 antibody (Clone HIT8a, BioLegend), and gating on the percentage of live, CFSE low proliferating CD4+ or CD8+ T cells. Data was acquired using a FACS Canto II (BD Biosciences), and analyzed using FlowJo (Treestar) and Prism (Graphpad) software.

[0521] Results: Combination of CHA.7.518.1.H4(S241P) and an anti-TIGIT antibody augments CD4+ T cell proliferation compared to single antibody treatments: The ability of CHA.7.518.1.H4(S241P) humanized hybridoma-derived PVRIG antibody to enhance primary CD4+ T cell proliferation in vitro when combined with an anti-TIGIT antibody was assessed with the CHO-S OKT3 assay.

[0522] FIGS. 33A and B show the percentage of proliferating CD4+ T cells from two different donors in response to co-culture with the CHO-S OKT3 hPVRL2 target cells, and treated with anti-PVRIG and anti-TIGIT antibodies either alone or in combination. In these two representative human CD3+ T cell donors, the combination of CHA.7.518.1.H4(S241P) and the anti-TIGIT antibody increases CD4+ T cell proliferation compared to CHA.7.518.1.H4(S241P) alone, or the combination of IgG4 isotype and the anti-TIGIT antibody. The anti-DNAM-1 antibody reduces CD4+ T cell proliferation compared to the IgG1 isotype control in both donors.

[0523] CHA.7.518.1.H4(S241P) and an anti-TIGIT antibody enhances CD8+ T cell proliferation and IFN-g secretion FIG. 34A illustrates the ability of the humanized PVRIG antibody, CHA.7.518.1.H4(S241P), to increase CD8+ T cell proliferation in combination with the anti-TIGIT antibody in the CHO-S OKT3 assay. In a representative human CD8+ T cell donor, the combination of CHA.7.518.1.H4(S241P) and the anti-TIGIT antibody increases CD8+ T cell proliferation when T cells are co-cultured with the CHO-S OKT3 hPVRL2 cells. The combination of anti-PVRIG and anti-TIGIT antibodies increases proliferation greater than CHA.7.518.1.H4(S241P) alone, or the hIgG4 isotype plus anti-TIGIT antibody treatment. FIG. 34B shows that in the same representative human CD8+ T cell donor as described above, the humanized PVRIG antibody, CHA.7.518.1.H4(S241P), in combination with the anti-TIGIT antibody also enhances IFNγ secretion in the CHO-S OKT3 assay. The combination of anti-PVRIG and anti-TIGIT antibodies increases IFNγ secretion greater than CHA.7.518.1.H4(S241P) alone, or the hIgG4 isotype plus anti-TIGIT antibody treatment. The anti-DNAM-1 antibody reduces both CD8+ T cell proliferation and IFNγ production compared to the IgG1 isotype control antibody.

### Summary and Conclusions

[0524] Together, the humanized PVRIG antibody, CHA.7.518.1.H4(S241P) and the anti-TIGIT antibody had in vitro functional activity in the primary cell-based CHO-S OKT3 assay. The combination of CHA.7.518.1.H4(S241P) and the anti-TIGIT antibody led to increased CD4+ and CD8+ T cell proliferation, as well as IFNγ secretion from CD8+ T cells compared to treatment with either CHA.7.518.1.H4(S241P) or the anti-TIGIT antibody alone. Together, these data demonstrate that co-blockade of the two checkpoint receptors, PVRIG and TIGIT, increased T cell function compared to single receptor blockade.

[0525] It should be noted that TIGIT does not interact with CD112 (PVRL2; see FIGS. 4E and 4F of Zhu et. al., J. Exp. Med. (2016):1-10); rather, it interacts with PVR, a different ligand. PVR is expressed in the CHO/CD112 system of Zhu et al. Accordingly, our interpretation of the combination effect of the aCD112R (anti-PVRIG antibody) and anti TIGIT is that the aCD112R/aPVRIG is blocking the interaction of human CD112R with human CD112, but the anti TIGIT antibody is blocking the interaction of human TIGIT with human or hamster PVR (on T cells or CHO cells), Zhu et al do not really give a hypothesis as to why the anti CD112R/anti TIGIT combination effect is occurring in the CHO CD112 assay. That is, the combination effect is not through the PVRL2/CD112 ligand alone.

### D. Example 4

### Epitope Mapping of Anti-Human PVRIG Antibodies Based on Cynomolgus Cross-Reactivity

### Rationale and Objectives

[0526] The objective of this study is to identify the epitopes on the PVRIG protein that determine cross-reactivity of anti-human PVRIG antibodies against the cynomolgus monkey (cyno) orthologue. Many of the antibodies against human PVRIG target show varied degrees of cyno cross-reactivity despite the fact that many of these antibodies belong to the same epitope bin. To shed light on the molecular basis of human/cyno cross-reactivity (or lack thereof), several cyno-to-human mutations of the PVRIG recombinant proteins were designed, expressed and purified, and tested for binding to a panel of anti-human PVRIG antibodies in ELISA.

### Methods

[0527] Design of cyno-to-human PVRIG variants: Sequence alignment of human and PVRIG ECDs shows 90% sequence identity and 93% sequence homology between human and cyno orthologs. Based on the nature of the mutations (conserved vs non-conserved) and the secondary structure prediction (coil vs extended) of the mutation region, three site-directed mutants of the cyno PVRIG were designed to probe the cyno-cross reactivity focused epitope mapping. These mutants include H61R, P67S, and L95R/T97I cyno PVRIG. Wild type cyno and human PVRIG were also generated.

[0528] Expression and purification of cyno, human, and hybrid PVRIG variants: All the PVRIG variants were expressed as ECD fusions with a C-terminal 6× His tag in mammalian cells. The proteins were purified by affinity purification, ion-exchange chromatography, and size-exclusion chromatography. The purified proteins were buffer-exchanged into PBS buffer (pH 7.4) and stored at 4° C.

[0529] ELISA to determine PVRIG-antibody interaction: The functional ELISA was performed as follows: cyno, human, and cyno/human hybrid PVRIG (His-tagged) recombinant proteins were adsorbed on an IA plate overnight at 4° C. Coated plate wells were rinsed twice with PBS and incubated with 300 μL blocking buffer (5% skim milk powder in PBS pH 7.4) at room temperature (RT) for 1 hr. Blocking buffer was removed and plates were rinsed twice more with PBS. Plate-bound PVRIG variants were incubated with anti-human PVRIG mAbs (human IgG1 isotype) in solution (linear range of 0.1 μg/mL to 8 μg/mL in a 50 μL/well volume) at RT for 1 hr. Plates were washed three times with PBS-T (PBS 7.4, 0.05% Tween20), then three times with PBS and 50 μL/well of a HRP-conjugated secondary antibody was added (Human IgG Fc domain specific, Jackson ImmunoResearch). This was incubated at RT for 1 hr and plates were washed again. ELISA signals were developed in all wells by adding 50 μL of Sureblue TMB substrate (KPL Inc) and incubating for 5-20 mins. The HRP reaction was stopped by adding 50 μL 2N H2SO4 (VWR) and absorbance signals at 450 nm were read on a SpectraMax (Molecular Devices) or EnVision (PerkinElmer) spectrophotometer. The data were exported to Excel (Microsoft) and plotted in GraphPad Prism (GraphPad Software, Inc.).

### Results

[0530] S67, R95, and I97 residues as determinants of cyno cross-reactivity: The binding data shown in FIG. 18 dearly shows that the S67, R95, and I97 residues affect the cyno cross-reactivity of various antibodies. While the P67S cyno-to-human mutation negatively impacts the binding of CPA.7.002 and CPA.7.041, the L95R/T97I cyno-to-human mutation significantly improves the binding of CPA.7.002, CPA.7.021, CPA.7.028, and CPA.7.041. On the other hand, H61R cyno-to-human mutation does not affect the binding of any of the antibodies tested.

[0531] Relative binding to cyno-to-human variants suggests three epitope groups: The relative binding of the antibodies to cyno, human and hybrid PVRIG variants suggests 3 distinct epitope groups: Group 1 binds to R95/I97 residues (CPA.7.021 and CPA.7.028). Group 2 binds to S67 and R95/I97 residues (CPA.7.002 and CPA.7.041). Group 3 does not bind to S67 or R95/I97 residues (CPA.7.024 and CPA.7.050). The epitope groups show strong correlation to the degree of cyno cross-reactivity of these antibodies (FIG. 19).

[0532] Summary and Conclusions: The restricted epitope mapping based on cyno-to-human variations in the PVRIG ECD identified S67, R95, and I97 residues as determinants of cyno cross-reactivity of anti-human PVRIG antibodies. The complete restoration of binding to L95R/T97I cyno PVRIG for CPA.7.021 and CPA.7.028 antibodies and improved binding of CPA.7.002 to this mutant strongly suggests that R95 and I97 residues are critical human PVRIG epitopes for these antibodies. These findings also suggest a possible way to predict cross-reactivity to non-human primate PVRIG orthologs based on their primary amino acid sequence.

### E. Example 5

### Humanized Antibodies: Binding and Receptor-Ligand Blocking Analysis of Humanized Anti-PVRIG Hybridoma-Derived Antibodies, CHA.7.518.1.H4(S241P) and CHA.7.538.1.2.H4(S241P)

[0533] This experiment was run to characterize the binding of CHA.7.518.1.H4(S241P) and CHA.7.538.1.2.H4(S241P) to human and cynomolgus PVRIG protein on cell lines and primary leukocytes, to characterize the capacity of CHA.7.518.1.H4(S241P) and CHA.7.538.1.2.H4(S241P) to block the interaction between PVRIG and PVRL2 and to characterize the epitope space of CHA.7.518.1.H4(S241P) and CHA.7.538.1.2.H4(S241P) relative to each other, by assessing competition for binding to PVRIG antigen expressed on Jurkat cells.

[0534] FACS analysis of hPVRIG over-expressing cells: The following cell lines were used to assess the specificity of CHA.7.518.1.H4(S241P) and CHA.7.538.1.2.H4(S241P): HEK parental and HEK hPVRIG over-expressing cells. These cells were cultured in DMEM (Gibco)+10% fetal calf serum (Gibco)+glutamax (Gibco). For the HEK hPVRIG over-expressing cells, 0.5 ug/ml puromycin (Gibco) was also added to the media for positive selection. For FACS analysis, all cell lines were harvested in log phase growth and 50,000-100,000 cells per well were seeded in 96 well plates. Binding of unconjugated CHA.7.518.1.H4(S241P) and CHA.7.538.1.2.H4(S241P) (hIgG4) and their respective controls were assessed in an 8-point titration series starting at 10 ug/ml on ice for 30 mins-1 hr. The titration series was conducted as 3 fold serial dilutions. Unconjugated primary antibodies were detected with an anti-human Fc Alexa 647 conjugated antibody (Jackson Laboratories). Data was acquired using a FACS Canto II (BD Biosciences), FACS LSR Fortessa X-20 (BD Biosciences), or IntelliCyt (IntelliCyt Corporation) and analyzed using FlowJo (Treestar) and Prism (Graphpad) software.

[0535] FACS analysis of human cell lines for hPVRIG: The following cell lines were used to assess the expression and specificity of CHA.7.518.1.H4(S241P) and CHA.7.538.1.2.H4(S241P): Jurkat and HepG2. Jurkat cells were cultured in RPMI media+10% fetal calf serum, glutamax, non-essential amino acids (Gibco), sodium pyruvate (Gibco), and penicillin/streptomycin (Gibco). HepG2 cells were cultured in DMEM+10% fetal calf serum+glutamax. For FACS analysis, all cell lines were harvested in log phase growth and 50,000-100,000 cells per well were seeded in 96 well plates. Binding of unconjugated CHA.7.518.1.H4(S241P) and CHA.7.538.1.2.H4(S241P) (hIgG4) and their respective controls were assessed in an 8-point titration series starting at 10 ug/ml on ice for 30 mins-1 hr. Unconjugated primary antibodies were detected with an anti-human Fc Alexa 647 conjugated antibody. The titration series were conducted as 3-fold serial dilutions. Data was acquired using a FACS Canto II or IntelliCyte and analyzed using FlowJo and Prism software.

[0536] FACS analysis of PVRIG on CMV-expanded CD8 T cells: CMV reactive donors were purchased from Cellular Technology Limited (CTL). Supplied PBMC were pulsed for 2 hours with 10 uM CMV peptide 494-503 (NLVPMVATV, Anaspec). The PBMC were subsequently washed three times after which they were plated in 24 well plates for 9 days in RPMI+10% human AB serum (Sigma), glutamax, penicillin/streptomycin, and a cytokine growth cocktail consisting of 2 ng/ml IL-2 (R&D systems) and 10 ng/ml IL-7 (R&D systems). After 9 days, non-adherent cells were harvested, phenotyped for CD8 T cell enrichment, and banked in liquid nitrogen.

[0537] To assess expression on CMV-expanded CD8 T cells, binding of unconjugated CHA.7.518.1.H4(S241P) and CHA.7.538.1.2.H4(S241P) (hIgG4) and their respective controls was assessed in an 8-point titration series starting at 666 nM on ice for 30 mins-1 hr. The titration series was conducted as a 4-fold serial dilution series. Unconjugated primary antibodies were detected with an anti-human Fc Alexa 647 conjugated antibody. Data was analysed using FlowJo and Prism software and collected on a BD LSR Fortessa X-20.

[0538] FACS analysis of cynomolgus PVRIG engineered over-expressing cells: The following cell lines were used to assess the cross-reactivity of CHA.7.518.1.H4(S241P) and CHA.7.538.1.2.H4(S241P) with cynomolgus PVRIG (cPVRIG): expi parental and expi cPVRIG over-expressing cells. These cells were cultured in DMEM+10% fetal calf serum+glutamax. expi cPVRIG transient over-expressing cells were generated by electroporating cPVRIG DNA into parental expi cells using the Neon transfection system. For FACS analysis, expi cPVRIG cells were used between 1-3 days-post transfection. Parental expi cells were harvested from log growth phase. 50,000-100,000 cells of per well of each type were seeded in 96 well plates. Binding of unconjugated CHA.7.518.1.H4(S241P) and CHA.7.538.1.2.H4(S241P) (hIgG4) and their respective controls were assessed in an 8-point titration series starting at 10 ug/ml on ice for 30 mins-1 hr. The titration series were conducted as a 3-fold dilution series. Unconjugated primary antibodies were detected with an anti-human Fc Alexa 647 conjugated antibody. Data was acquired using a FACS Canto II or IntelliCyte and analyzed using FlowJo and Prism software.

[0539] Cellular-based receptor-ligand blocking assays: The ability of CHA.7.518.1.H4(S241P) and CHA.7.538.1.2.H4(S241P) to inhibit the interaction of PVRIG with its ligand PVRL2 was assessed in a cellular competition assay conducted in two orientations.

[0540] In the first orientation, PVRL2 is endogenously expressed on un-manipulated HEK cells, and the ability of CHA.7.518.1.H4(S241P) and CHA.7.538.1.2.H4(S241P) to block soluble biotinylated PVRIG Fc binding to HEK cells was measured. More specifically, biotinylated PVRIG Fc protein (33 nM) and CHA.7.518.1.H4(S241P) and CHA.7.538.1.2.H4(S241P) (1.03-198 nM, hIgG4) were concominantly added to 100,000 HEK cells and incubated for 1 hour on ice. The extent of biotinylated PVRIG Fc binding was subsequently detected by the addition of streptavidin Alexa 647 (Jackson Laboratories) for 20-30 minutes on ice. Cells were washed twice in PBS for acquisition using a FACS Canto II. Data was analyzed using FlowJo, Excel (Microsoft), and Prism.

[0541] In the second orientation, HEK cells were engineered to express human PVRIG (HEK hPVRIG) and the ability of CHA.7.518.1.H4(S241P) and CHA.7.538.1.2.H4(S241P) (hIgG4) to inhibit soluble human PVRL2 Fc was assessed. More specifically, HEK hPVRIG cells were pre-incubated with CHA.7.518.1.H4(S241P) and CHA.7.538.1.2.H4(S241P) (0.66-66 nM) for 30 mins on ice, after which PVRL2 mFc (human PVRL2 with a mouse Fc) was added (for 1 hr on ice) and its ability to bind HEK hPVRIG was measured. The extent of PVRL2 mFc binding was detected by the subsequent addition of goat anti-mouse Fc A647 (Jackson Laboratories) for 20-30 mins on ice. Cells were washed twice in PBS for acquisition using a FACS Canto II. Data was analyzed using FlowJo, Excel and Prism.

[0542] Cellular-based epitope space analysis: Epitope space for CHA.7.518.1.H4(S241P) and CHA.7.538.1.2.H4(S241P) was assessed on their ability to compete with another for binding to Jurkat cells. Briefly, Jurkat cells were harvested in log growth phase and stained with @@μg/ml unlabeled CHA.7.518.1.H4(S241P) and CHA.7.538.1.2.H4(S241P) for 30 mins on ice. Jurkat cells were subsequently spun down, washed, and counterstained with @μg/ml Alexa 647-labelled CHA.7.518.1.H4(S241P) and CHA.7.538.1.2.H4(S241P) for 30 mins on ice. The competition of labelled antibodies for PVRIG binding with unlabeled antibodies on Jurkat cells was assessed by the magnitude of Alexa 647 signal by flow cytometry. Data was acquired using a FACS Canto II and analysed using FlowJo, Excel, and Prism.

### Results

[0543] CHA.7.518.1.H4(S241P) and CHA.7.538.1.2.H4(S241P) recognize PVRIG on overexpressing cells, Jurkat cells, and human T cells: The ability of CHA.7.518.1.H4(S241P) and CHA.7.538.1.2.H4(S241P) humanized hybridoma-derived PVRIG antibodies to bind to human PVRIG was assessed using HEK cells that overexpress human PVRIG, Jurkat cells, and primary T cells. FIG. 20 illustrates the specificity of both CHA.7.518.1.H4(S241P) (A) and CHA.7.538.1.2.H4(S241P) (B). Both antibodies bind highly specifically to HEK hPVRIG cells, and do not bind to HEK parental cells.

[0544] Binding affinities: Both CHA.7.518.1.H4(S241P) and CHA.7.538.1.2.H4(S241P) also display binding to HEK hPVRIG cells with high affinity with their associated Kd values: 0.29 nM for CHA.7.518.1.H4(S241P) and 0.86 nM for CHA7.538.1.2 for binding to HEK hPVRIG cells.

[0545] FIG. 21 illustrates the ability of CHA.7.518.1.H4(S241P) (A) and CHA.7.538.1.2.H4(S241P) (B) to bind Jurkat cells that endogenously express PVRIG. Both are able to bind Jurkat cells with a comparable affinity to HEK hPVRIG cells.

[0546] The affinity of these antibodies to Jurkat cells are 0.15 nM for CHA.7.518.1.H4(S241P) and 0.59 nM for CHA.7.538.1.2.H4(S241P).

[0547] FIG. 22 illustrates the ability of CHA.7.518.1.H4(S241P) and CHA.7.538.1.2.H4(S241P) to bind CD8 T cells that were expanded by exposure to CMV peptide (494-503, NLVPMVATV) and endogenously express PVRIG.

[0548] CHA.7.518.1.H4(S241P) and CHA.7.538.1.2.H4(S241P) detect cynomolgus PVRIG (cPVRIG) expressed on expi cells: The ability of CHA.7.518.1.H4(S241P) and CHA.7.538.1.2.H4(S241P) to bind to cPVRIG was assessed using expi cells that overexpress cPVRIG. FIG. 23 illustrates the specificity of both CHA.7.518.1.H4(S241P) (A) and CHA.7.538.1.2.H4(S241P) (B). Both antibodies bind highly specifically to expi cPVRIG cells, and do not bind to expi parental cells. Both CHA.7.518.1.H4(S241P) and CHA.7.538.1.2.H4(S241P) also display binding to expi cPVRIG cells with high affinity with their associated Kd values of 0.24 nM for CHA.7.518.1.H4(S241P) and 0.58 nM for CHA7.538.1.2.

[0549] Cellular-based receptor-ligand blocking assays: The ability of CHA.7.518.1.H4(S241P) and CHA.7.538.1.2.H4(S241P) to inhibit the interaction of PVRIG with PVRL2 was assessed in two orientations, as outlined in the protocols section. In the first permutation, both CHA.7.518.1.H4(S241P) and CHA.7.538.1.2.H4(S241P) were able to completely inhibit the binding of PVRIG Fc to HEK cells (FIG. 24A). The IC50 values associated with this blocking capacity are 15 nM for CHA.7.518.1.H4(S241P) and 16.1 nM for CHA.7.538.1.2.H4(S241P). Importantly, not all the antibodies derived from the hybridoma campaign confirmed to bind to PVRIG were able to block the binding of PVRIG Fc to HEK cells. As shown in FIG. 24B, an antibody done designated CHA.7.544 is unable to block the binding of PVRIG Fc to HEK cells.

[0550] In the second permutation, both CHA.7.518.1.H4(S241P) and CHA.7.538.1.2.H4(S241P) were also able to completely inhibit the binding of PVRL2 Fc to HEK hPVRIG cells (FIG. 25A). The IC50 values associated with this inhibition are 1.8 nM for CHA.7.518.1.H4(S241P) and 2.53 nM for CHA.7.538.1.2.H4(S241P). Although the ability of CHA.7.518.1.H4(S241P) and CHA.7.538.1.2.H4(S241P) were able to completely inhibit PVRL2 Fc binding in this permutation, consistent with their ability to inhibit PVRIG Fc binding in the first permutation, other antibodies did not show this same trend. More specifically, another humanized hybridoma-derived antibody, CHA.7.530.3, that was able to completely inhibit binding of PVRIG Fc to HEK cells (first permutation, data not shown), was not able to completely inhibit binding of PVRL2 Fc binding to HEK hPVRIG cells (FIG. 25A). Collectively, this data indicates that the second permutation of the cellular-based receptor ligand blocking assay is able to distinguish potency of receptor-ligand blocking antibodies with more sensitivity compared to the first permutation. Importantly, CHA.7.544 was shown to be unable to block the binding of PVRL2 Fc to HEK hPVRIG cells (FIG. 25B) consistent with its inability to block PVRIG Fc binding to HEK cells.

[0551] Cellular-based epitope space analysis: As outlined in the protocols section, an analysis of the epitope space of CHA.7.518.1.H4(S241P) and CHA.7.538.1.2.H4(S241P) was conducted by assessing their ability to compete for PVRIG binding. FIG. 26 shows the ability of unconjugated versions of the antibodies to inhibit binding of the Alexa 647 (A647) conjugated versions of the same antibodies. The data in the FIG. 26 depicts the percentage binding of A647 conjugated antibodies relative to the maximum signal they yield with no competition. The signal yielded from CHA.7.518.1.H4(S241P) A647 and CHA.7.538.1.2.H4(S241P) A647 was not affected by pre-incubation of the Jurkat cells with isotype control (data not shown). As expected, the signal yielded from CHA.7.518.1.H4(S241P) A647 and CHA.7.538.1.2.H4(S241P) A647 was significantly reduced when in competition with unconjugated versions of themselves (data not shown). Interestingly, upon analysis of A647 signal from CHA.7.518.1.H4(S241P) and CHA.7.538.1.2.H4(S241P) in the context of pre-incubation with the unconjugated version of the opposite antibody, there was also significant reduction. This indicates that CHA.7.518.1.H4(S241P) and CHA.7.538.1.2.H4(S241P) may share a similar epitope space on endogenously expressed PVRIG.

[0552] Summary and Conclusions: Mouse versions of anti-PVRIG antibodies designated CHA.7.518 and CHA.7.538 were successfully humanized into a human IgG4 isotype (CHA.7.518.1.H4(S241P) and CHA.7.538.1.2.H4(S241P)) which retained binding properties towards the human PVRIG antigen. Using engineered over-expressing cells, Jurkat, and CMV expanded primary CD8 T cells, CHA.7.518.1.H4(S241P) and CHA.7.538.1.2.H4(S241P) were shown to be highly specific to endogenous human PVRIG and bound with high affinity. Furthermore, CHA.7.518.1.H4(S241P) and CHA.7.538.1.2.H4(S241P) also showed reactivity to cyno PVRIG antigen and bound to over-expressing cells with high affinity. Functionally, CHA.7.518.1.H4(S241P) and CHA.7.538.1.2.H4(S241P) were able to inhibit the interaction of PVRIG with PVRL2 in FACS-based assays. Lastly, CHA.7.518.1.H4(S241P) and CHA.7.538.1.2.H4(S241P) were shown to potentially share epitope space on endogenous human PVRIG due to their ability to compete with one another for binding to Jurkat cells.

### F. Example 6

### Humanized Antibodies: Functional Analysis of Humanized Antibodies

[0553] The functional activity of several humanized antibodies of the invention was validated.

[0554] CHO-S OKT3 assay: The CHO-S OKT3 assay was utilized to determine whether the humanized PVRIG antibodies, CHA.7.518.1.H4(S241P) and CHA.7.538.1.2.H4(S241P), could enhance CD4+ and CD8+ T cell proliferation, and cytokine secretion. The target cells used in the co-culture assay were the Chinese hamster ovary cell line, CHO-S (ATCC), either stably overexpressing the single chain variable fragment of the anti-human CD3 antibody Clone OKT3 (abbreviated as OKT3), or stably overexpressing both OKT3 and human PVRL2 (abbreviated as hPVRL2). CHO-S OKT3 parental cells were grown in serum-free CD-CHO medium (Gibco) supplemented with 40 mM glutamax (Gibco), penicillin/streptomycin (Gibco), and 6 μg/ml puromycin (Gibco). CHO-S OKT3 hPVRL2 cells were grown in the same CD-CHO medium as the parental cells, but also supplemented with 600 μg/ml hygromycin B (Gibco).

[0555] Primary CD4+ and CD8+ T cells were isolated from healthy human donors using the RosetteSep™ human CD4+ T cell enrichment cocktail (Stemcell Technologies), and the human CD8+ microbeads (Miltenyi Biotec), respectively, and frozen in liquid nitrogen. On the day of the co-culture assay, CD4+ or CD8+ T cells were thawed, counted, and labeled with 1 μM CFSE (Life Technologies) for 10 minutes at 37° C. Following this incubation, T cells were washed and resuspended in complete medium containing RPMI (Gibco), supplemented with 10% heat-inactivated FBS, glutamax, penicillin/streptomycin, non-essential amino acids (Gibco), sodium pyruvate (Gibco), and 50 μM β-mercaptoethanol (Gibco). CHO-S OKT3 and CHO-S OKT3 hPVRL2 cells were harvested from culture, and treated with mitomycin C (Sigma-Aldrich) for 1 hour at 37° C. with periodic mixing. After the incubation, the target cells were thoroughly washed, counted, and resuspended in complete RPMI medium. The assay was set up with a 5:1 ratio of T cells (100,000) to target cells (20,000). The target cells, T cells, and 10 μg/ml of each antibody treatment were added together in a 96-well U-bottom plate (Costar), and incubated for either 3 days (CD8+ T cells), or 5 days (CD4+ T cells) at 37° C. The PVRIG antibody treatments included human CHA.7.518.1.H4(S241P) IgG4, human CHA.7.538.1.2.H4(S241P) IgG4, human CHA.7.530.3 IgG4 (partial receptor/ligand blocking antibody), and mouse CHA.7.544 IgG1 (non-receptor/ligand blocking antibody). In addition to the PVRIG antibodies, the activity the mouse anti-human DNAM-1 IgG1 (Clone DX11, BioLegend), mouse IgG1 isotype control (Clone MOPC21, BioLegend), and a human IgG4 isotype control was also assessed. For antibody dose-titrations, 3-fold dilutions from 66 nM to 0.264 nM of the PVRIG antibodies, and the respective isotype control antibody were utilized.

[0556] After the 3 or 5-day incubation period, co-culture supernatants were analyzed for secreted cytokines, including IL-2, IL-4, IL-5, IL-6, IL-9, IL-10, IL-13, IL-17A, IL-17F, IL-21, IL-22, TNFα, and IFNγ, with the cytometric bead array (CBA) human Th1/Th2/Th17 cytokine kit (BD Biosciences), or with the LEGENDplex™ Human Th cytokine kit (BioLegend). T cell proliferation was measured by staining CD4+ or CD8+ T cells with the LIVE/DEAD fixable aqua dead cell stain kit (ThermoFisher Scientific), anti-CD4 antibody (Clone RPA-T4, BioLegend), and anti-CD8 antibody (Clone HIT8a, BioLegend), and gating on the percentage of live, CFSE low proliferating CD4+ or CD8+ T cells. Data was acquired using a FACS Canto II (BD Biosciences), and analyzed using FlowJo (Treestar) and Prism (Graphpad) software.

### Results

[0557] CHA.7.518.1.H4(S241P) and CHA.7.538.1.2.H4(S241P) enhance CD4+ T cell proliferation in a hPVRL2-dependent manner: The ability of the CHA.7.518.1.H4(S241P) and CHA.7.538.1.2.H4(S241P) humanized hybridoma-derived PVRIG antibodies to enhance primary CD4+ T cell proliferation in vitro was assessed with the CHO-S OKT3 assay. FIG. 27A shows the percentage proliferating CD4+ T cells from a representative donor in response to co-culture with the CHO-S OKT3 hPVRL2 target cells and different PVRIG antibodies. In this donor, humanized CHA.7.518.1.H4(S241P) and CHA.7.538.1.2.H4(S241P) antibodies increase CD4+ T cell proliferation compared to the human IgG4 isotype control (dashed line). The partial receptor/ligand blocking antibody, human CHA.7.530.3 IgG4 only weakly enhances T cell proliferation, while the non-receptor/ligand blocking antibody, mouse CHA.7.544 IgG1 has no effect compared to the isotype control antibodies. The anti-DNAM-1 antibody reduces CD4+ T cell proliferation. FIG. 27B demonstrates that the effects of the humanized CHA.7.518.1.H4(S241P) and CHA.7.538.1.2.H4(S241P) PVRIG antibodies, and the anti-DNAM-1 antibody are dependent on hPVRL2 overexpression on the target cells. Following CHA.7.518.1.H4(S241P) and CHA.7.538.1.1 antibody treatment, a greater increase in CD4+ T cell proliferation is observed when the CD4+ T cells are co-cultured with the CHO-S OKT3 hPVRL2 cells, compared to co-culture with the CHO-S OKT3 parental cells. Similarly, the anti-DNAM-1 antibody only decreases CD4+ T cell proliferation when T cells are co-cultured with the hPVRL2-expressing CHO-S OKT3 cells.

[0558] CHA.7.518.1.H4(S241P) and CHA.7.538.1.2.H4(S241P) enhance CD8+ T cell proliferation and IFN-g secretion: FIG. 28A-B illustrate the ability of humanized PVRIG antibodies, CHA.7.518.1.H4(S241P) and CHA.7.538.1.2.H4(S241P), to increase CD8+ T cell proliferation in the CHO-S OKT3 assay. In two different human CD8+ T cell donors, CHA.7.518.1.H4(S241P) and CHA.7.538.1.2.H4(S241P) antibodies increase CD8+ T cell proliferation compared to the human IgG4 isotype control when T cells are co-cultured with the CHO-S OKT3 hPVRL2 cells. However, the mouse CHA.7.544 IgG1 has little to no effect. As observed with the CD4+ T cells, the anti-DNAM-1 antibody reduces CD8+ T cell proliferation. FIG. 28C shows that the humanized PVRIG antibodies, CHA.7.518.1.H4(S241P) and CHA.7.538.1.2.H4(S241P) also enhance IFNγ secretion in the CHO-S OKT3 assay. In three different human CD8+ T cell donors, CHA.7.518.1.H4(S241P) and CHA.7.538.1.2.H4(S241P) antibodies increase IFNγ production compared to the human IgG4 isotype control (dashed line). Increases in IL-10, IL22 and TNFα were also observed following CHA.7.518.1.H4(S241P) and CHA.7.538.1.2.H4(S241P) antibody treatment (data not shown).

[0559] CHA.7.518.1.H4(S241P) and CHA.7.538.1.2.H4(S241P) consistently enhance CD4+ T cell proliferation across multiple human donors: Next, to demonstrate that the CHA.7.518.1.H4(S241P) and CHA.7.538.1.2.H4(S241P) antibodies could reproducibly enhance T cell function, the effects of the humanized PVRIG antibodies on CD4+ T cell proliferation were examined across 11 different donors in the CHO-S OKT3 assay. FIG. 29 demonstrates that both CHA.7.518.1.H4(S241P) and CHA.7.538.1.2.H4(S241P) consistently increased CD4+ T cell proliferation in the majority of the tested donors compared to the human IgG4 isotype control antibody when T cells were co-cultured with the CHO-S OKT3 hPVRL2 cells. Furthermore, the partial receptor/ligand blocking antibody, CHA.7.530.3, and the non-receptor/ligand blocking antibody, CHA.7.544, do not consistently enhance CD4+ T cell proliferation across the same donors.

[0560] CHA.7.518.1.H4(S241P) and CHA.7.538.1.2.H4(S241P) have a dose-dependent effect on CD4+ and CD8+ T cell proliferation: Finally, the dose-dependent effect of the humanized PVRIG antibodies, CHA.7.518.1.H4(S241P) and CHA.7.538.1.2.H4(S241P) was measured in the CHO-S OKT3 assay. Decreasing the dose of the CHA.7.518.1.H4(S241P) and CHA.7.538.1.2.H4(S241P) antibodies lowers the percent of CD4+ T cell (FIG. 30A), and CD8+ T cell (FIG. 30B) proliferation when the T cells are co-cultured with the CHO-S OKT3 hPVRL2 cells. This dose-dependent effect on T cell proliferation is not observed with the CHA.7.544 antibody, nor the IgG4 isotype control. Furthermore, no biphasic effect with the dose titration was observed, suggesting a lack of agonist activity of the humanized PVRIG antibodies.

### Summary and Conclusions

[0561] Humanized PVRIG antibodies, CHA.7.518.1.H4(S241P) and CHA.7.538.1.2.H4(S241P), had in vitro functional activity in the primary cell-based CHO-S OKT3 assay. CHA.7.518.1.H4(S241P) and CHA.7.538.1.2.H4(S241P) both increased CD4+ and CD8+ T cell proliferation in a dose-dependent manner. CHA.7.518.1.H4(S241P) and CHA.7.538.1.2.H4(S241P) were also capable of augmenting IFNγ secretion in the CHO-S OKT3 assay. It was shown that the activity of the CHA.7.518.1.H4(S241P) and CHA.7.538.1.2.H4(S241P) antibodies was dependent on overexpression of hPVRL2 on target cells. CHA.7.518.1.H4(S241P) and CHA.7.538.1.2.H4(S241P) consistently enhanced T cell activity across multiple human donors, while the non-blocking CHA.7.544 antibody had little to no effect.

### G. Example 7

### Development of Rat Monoclonal Antibodies for Mouse PVRIG

[0562] Development of rat monoclonal antibodies (mAbs) was performed at Aldevron Freiburg (Germany). Antibodies against mouse PVRIG protein were raised by using DNA immunization technology. Immunization vector expressing mouse PVRIG introduced into the host organism (rat). Mouse PVRIG was expressed, and an immunization response was generated. Positive antisera identification and hybridomas screening were analyzed on cells transiently express mouse PVRIG.

### Rat Anti-Mouse PVRIG pAb Generation

[0563] Development of rat polydonal antibodies against mouse PVRIG protein included cloning of mouse PVRIG extracellular domain into Aldevron proprietary immunization vector, and cloning of the full length and the extracellular domain into Aldevron proprietary screening vectors. The various expression vectors used for immunizations and for screening were confirmed by FACS on cells transiently express mouse PVRIG. Three rats were then immunized with the immunization vector. Immune sera were taken and diluted sera were tested by FACS using cells transiently transfected with the screening vectors. Production bleeds from each rat were collected, and purification using protein-A was performed.

### Rat Anti-Mouse PVRIG mAb Generation

[0564] Fusion of rat lymphocytes and selection using Aldevron's test systems were performed. This included: Fusion of 20×96-well plates followed by initial screening by Cell Based ELISA (cELISA), on transiently transfected cells with mouse PVRIG ECD (extracellular domain) or FL (full length). 108 positive clones (bound to cells expressing mouse PVRIG ECD\FL) were further propagated and retested. 30 positives clones were propagated into T-25 flasks and the supernatants were tested in cell based ELISA. 23 hybridoma clones were selected for further subcloning. Serum free supernatant was tested by cELISA and by FACS. Total of 21 clones were generated and binding was confirmed on cells over expressing the mouse PVRIG protein.

### Abs Characterization

[0565] Binding of the rat anti mouse PVRIG test bleeds, purified pAb, pre-clonal and clonal supernatants as well as the purified mAbs, was analyzed by Flow Cytometry, using stable HEK293 cells over expressing the mouse PVRIG. The binding of the antibodies to D10.G4.1 cells endogenously expressing mouse PVRIG was also tested. Specific cell surface expression of mouse PVRIG was confirmed. Cells (1-2×10⁵) were stained with Fixable viability stain diluted 1:1000 in PBS, for 10 min at R.T. followed by cells washing with PBS. The Abs were then added to cells (diluted in FACS buffer) followed by staining with goat anti rat-PE (diluted 1:100 in FACS buffer).

[0566] mAbs specificity was tested by siRNA for PVRIG transfection of D10.G4.1 cell line endogenously expressing mouse PVRIG. Reduction in cell surface was observed following mouse PVRIG knockdown.

mAbs Binding to NK Cells was also Tested by FACS.
Binning Assay was Performed to Demonstrate mAbs Diversity.

[0567] Affinity of the purified mAbs (Kd) was determined by FACS titration on stable cells over expressing the mouse PVRIG versus empty vector transduced cells, and on D10.G4.1 cell line. Cells (1×10⁵) were stained with Fixable viability stain diluted 1:1000 in PBS, for 10 min at RT followed by cells washing with PBS. The Abs were then added to cells (8 concentrations—series dilution 1:3, 10-0.01 μg/ml diluted in FACS buffer) followed by staining with Goat Anti rat-PE (diluted 1:100 in FACS buffer).

mAbs Characterization—Summary Table

[0568] Table 7 (columns 1-10) summarize the data generated for the characterization of the anti-mouse PVRIG antibodies.
[0569] Column 1 represent the Ab code ID
[0570] Column 2 represent the Ab name provided by Aldevron
[0571] Column 3 represent FACS data as MFI ratio on stable over expressing cells over empty vector transduced cells at 10 μl/ml mAb concentration
[0572] Column 4 represent affinity (nM) on the over expressing HEK cells
[0573] Column 5 represent binding to NK cells at 10 ug\ml mAb concentration
[0574] Column 6 represent MFI ratio of binding of D10.G4.1 cell line over isotype control
[0575] Column 7 represent affinity (nM) to D10.G4.1 cell line
[0576] Column 8 represent the various bins in the epitope binning assay
[0577] Column 9 represent % Receptor-Ligand blocking assay (mouse PVRIG-Fc fusion protein binding to mouse PVRL2 over expressing cells) and IC50 (nM)
[0578] Column 10 represent % Receptor-Ligand blocking assay (mouse PVRL2-Fc fusion protein binding to mouse PVRIG over expressing cells) and IC50 (nM)

[0579] AB-406 and AB-407 demonstrated blocking activity in both Receptor-Ligand binding assays have relative high affinity, binds to NK and to D10.G4.1 cells.

[0580] These Abs were selected for TME expression and for in vivo studies.

TABLE 7
Anti-mouse PVRIG monoclonal Abs characterization.

| | | | | Expression | Expression | Kd (nM) | | % R-L | |
|---|---|---|---|---|---|---|---|---|---|
| | | MFIr (HEK | Kd (nM) | in NK | in D10.G4.1 | On | | blocking | % R-L blocking |
| | | OX\EV) | On OX | MFIr | MFIr | D10.G4.1 | | (029-Fc) | (mPVRL2-Fc) |
| LIMS ID | Ab name | 10 ug/ml | Cells | (Ab\Iso) | (Ab\Iso) | Cells | Epitop Binning | (IC50) | (IC50) |
| AB-400 | BOJ-1F11-H6 | 10 | 0.1393 | NT | 13.2 | 35.68 | 1 | Agonist | Agonist |
| AB-401 | BOJ-3E2-F4 | 55.7 | 2.4 | NT | 7.5 | NT | 1 | Agonist | inconsistent |
| AB-402 | BOJ-4F11-H6 | 4.8 | 0.08974 | NT | 20 | NT | 1 | Agonist | Agonist |
| AB-403 | BOJ-4G1-E3 | 28 | 57.64 | — | 2 | NT | 4 | 78% (2.782) | Inconsistent |
| AB-404 | BOJ-4H8-E3 | 18.6 | 0.386833 | 1.5 | 6.8 | NT | 1 | Inert | 93-98% |
| AB-405 | BOJ-5A4-E3 | 13.5 | 0.08871 | NT | 6.7 | 4.596 | 1 | Agonist | Agonist |
| AB-406 | BOJ-5C7-B3 | 54.5 | 1.884667 | 2.2 | 10 | 8.577 | 3 | 77% (3.679) | 97-100% |
| AB-407 | BOJ-5G4-F4 | 50 | 0.334427 | 2.8 | 8 | 1.325 | 3 | 95% (3.992) | 95-100% |
| AB-408 | BOJ-8G1-G1 | 18.9 | 5.098 | 1.7 | 8 | NT | 4 | 90% (3.585) | Agonist |
| AB-409 | BOJ-9B1-D9 | 24.8 | 0.1555 | NT | 10 | NT | 1 | Agonist | inconsistent |
| AB-410 | BOJ-11C2-G9 | 16.6 | 0.2218 | 2.4 | 6.8 | NT | 1 | Agonist | inconsistent |
| AB-411 | BOJ-12E2-F8 | 36 | 5.3405 | NT | 5.4 | NT | 3 | 94% (4.311) | 96-100% (1.189) |
| AB-412* | BOJ-14H2-F4 | 3.3* | NT | NT | 2 | NT | 2 | Agonist | 62-67% (23.87) |
| AB-413* | BOJ-15B3-E11 | 49.3 | 1.09345 | 2.1 | 12 | 4.693 | 3 | 73% (2.836) | 95-100% (0.58) |
| AB-414 | BOJ-15F8-C6 | 24.8 | 2.0395 | 1.6 | 8.5 | 16.48 | 3 | 90% (2.907) | 95-100% (1.164) |
| AB-415 | BOJ-16E7-G8 | 24 | 17.573 | 2.2 | 5 | NT | 5 | 95% (6.727) | 95-100% (5.643) |
| AB-416 | BOJ-17C4-D4 | 26.3 | 6.357 | 1.5 | 5 | NT | 1 | Inert | 92-94% (1.963) |
| AB-417* | BOJ-17C7-H5 | 15 | 59.16 | — | 2.5 | NT | 4 | 72% (3.455) | Inert |
| AB-418 | BOJ-18C1-C10 | 64.8 | 62.98 | NT | 4.4 | NT | 5 | 94% (18.18) | 100% (8.055) |
| AB-419 | BOJ-18D2-F5 | 17 | 0.3169 | 1.5 | 6.3 | NT | 1 | Agonist | 57-64% |
| AB-420 | BOJ-19D9-C7 | 33.6 | 3.172 | 1.2 | 20 | NT | 4 | 78% (9.805) | Agonist |

### H. Example 8

### Combination Testing with Additional Immune Checkpoint Inhibitors

### Background

[0581] While antibody blockade of the CTLA4 and PD1 pathways has emerged as an effective treatment modality for cancer, the majority of patients do not derive long term benefit, suggesting a need for targeting of additional immune checkpoints. Employing our unique computational algorithms to define new members of the B7/CD28 family we identified PVRIG, which is expressed by multiple subsets of T and NK cells. We report here its expression pattern, functional characterization, and anti-tumor activity of blocking antibodies targeting this molecule.

### Methods

[0582] Utilizing the Predictive Discovery platform PVRIG was identified as a potential novel immune checkpoint, after which a retroviral cell screening library was used to identify its cognate binding counterpart. Target effects on T-cell modulation were assessed with primary and tumor-derived T-cell assays, taking advantage of target overexpression, knockdown, and antagonist antibody approaches. Antibodies against the human protein were screened for their ability to enhance T-cell activation in vitro, while antibodies targeting the mouse orthologue were assessed in vivo for effects on tumor growth inhibition in syngeneic models

### Results

[0583] A PVRIG-Fc-fusion protein was found to bind PVRL2, with binding specificity confirmed both by ELISA and flow cytometry analysis. PVRIG demonstrated unique expression kinetics upon T-cell activation, with detection of the target on memory T-cells, as well as on NK cells and γδ T-cells. A panel of high affinity human antibodies with the ability to block interaction of PVRIG with PVRL2 were generated, which when tested in vitro were shown to enhance activation of both primary CD4+ and tumor-derived CD8+ T-cells through a PVRL2-dependent mechanism.

[0584] Since CHA.7.518.1.H4(S241P) is not mouse cross-reactive, in vivo studies were conducted with a surrogate blocking anti-mouse PVRIG antibody. When combined with anti-PDL-1 blockade, anti-mouse PVRIG inhibits growth of established tumors in both the CT26 and MC38 colorectal cancer models. Combination testing with additional immune checkpoint inhibitors, as well as in PVRIG knockout mice, is ongoing

### Conclusions

[0585] High affinity antagonistic antibody, is able to enhance human T-cell activation, and a surrogate antibody with similar characteristics shows synergy with PD-L1 in vivo in multiple syngeneic models. Overall, our data demonstrates the utility of targeting PVRIG in addition to other B7 family checkpoints for the treatment of cancer

### I. Example 9

### In Vivo POC Study: Efficacy of Anti mPVRIg mAbs in CT26 Tumor Model

[0586] This example describes the efficacy of anti mPVRIg mAbs treatment in CT26 murine colon carcinoma model as mono-therapy or in combination with anti-PDL-1 treatment.

### Materials and Methods

### Tumor Challenge Experiments:

[0587] CT26 colon carcinoma was purchased from ATCC (CRL-2638). Cells were cultured in RPMI 1640 (Biological Industries, 01-100-1A) with 10% FBS (Biological Industries, 04-127-1A), and 100 μg/mL penicillin/streptomycin (Biological Industries, 03-031-1B). For tumor implantation, cells were harvested and washed, counted and suspended to 10⁷ cells/ml in cold RPMI 1640 and placed in ice. BALB/c mice ((female, 8 wk) Envigo), were anesthetized with 10% Ketamine (Clorketam; SAGARPA Q-7090-053) and 10% Xylazine (Sedaxylan; BE-V254834) mixture injected intraperitoneal. Next, the back of the mice was shaved and disinfected with a 70% Ethanol solution. Tumor cells were injected as 50 μL of 5×10⁵ CT26 cells subcutaneously into the back right flank of mice. The mAb administration started at day 4 (Mono treatment) or day 7 (Combo treatment) post tumor inoculation when tumors were at volume of 30-50 mm³ (Mono treatment) or reached the volume of 60-90 mm³ (Combo treatment); and was given intra-peritoneal (i.p.) in a final volume/injection of 200 ul, for 3 wks for a total of 6 administrations. Tumor growth was measured with electronic caliper every 2-3 days and was reported as 0.5×W²×L mm³. Mice were sacrificed with CO₂ at either study termination or any of the following clinical endpoints: tumor volume≥2250 mm³, tumor ulceration, body weight loss≥20%, or moribund appearance

### Antibodies:

[0588] The chimeric anti-mouse PVRIg antibodies (mAb 406 and mAb 407) used in this study, engineered as a Rat IgG2b isotype monoclonal antibody (mAb) were shown to bind to 293HEK transfectants expressing mPVRIg and block binding of mPVRL2 to these cells. The mIgG1 anti-mouse PDL-1 inhibitor used in this study was mAb YW243.55.S70. The YW243.55.S70 antibody is an anti-PD-L1 described in WO 2010/077634 (heavy and light chain variable region sequences shown in SEQ ID Nos.20 and 21, respectively, of WO 2010/077634), and having a sequence disclosed therein.

[0589] All mAbs were formulated in sterile PBS and were low in endotoxin (<0.05 EU/mg).

TABLE 8
Tested mAbs.

| | | | |
|---|---|---|---|
| 1 | Mouse IgG1, k Isotype Ctrl. | BP0083 | BioXcell |
| | (MOPC-21) | | |
| 2 | Rat IgG2b, k Isotype Ctrl. | BP0090 | BioXcell |
| | (LTF-2,) | | |
| 3 | Benchmark anti PDL-1 | YW243.55.S70 | Compugen |
| | (mIgG1) | | inc. |
| 4 | Anti CGEN PVRIG mAb 406 | BOJ-5C7-B3 | ALDEVERON |
| | (Rat IgG2b) | | |
| 5 | Anti CGEN PVRIG mAb 407 | BOJ-5G4-F4 | ALDEVERON |
| | (Rat IgG2b) | | |

### Study Design

### Mono Treatment

[0590] Eight weeks old BALB/c female mice were purchased from Envigo and maintained in an SPF animal facility for 1 week prior to beginning the experiment. Mice were anesthetized, shaved and inoculated subcutaneously with 50 μl of 5×10⁵ CT26 tumor cells. At day 4 post tumor inoculation, mice were randomly assigned into treatment groups of n=10 (as described below). Mice were treated with mAbs (as detailed below) injected on day 4, 7, 11, 14, 18 and 21 post inoculation. Tumor growth was measured with caliper every 2-3 days.

TABLE 9
Treatment groups.

| # | | Dose | # | Vol/Dose |
|---|---|---|---|---|
| Group | Treatment/mAb | (mg/Kg) | Dose | (ul) |
| 1 | Vehicle | | 6 | 200 |
| 2 | mIgG1 iso Ctrl | 5 | 6 | 200 |
| 3 | Rat IgG2b iso Ctrl | 10 | 6 | 200 |
| 4 | Anti-PDL-1 mIgG1 | 5 | 6 | 200 |
| 5 | Anti-mPVRIg mAb 406 rIgG2b | 10 | 6 | 200 |
| 6 | Anti-mPVRIg mAb 407 rIgG2b | 10 | 6 | 200 |

### Combo Treatment

[0591] For Combo of anti-mPVRIg and anti-mPDL-1 mAbs treatments. Mice were treated as described in the Mono treatment. At day 7 post tumor inoculation, mice were randomly assigned into treatment groups of n=10 as described below. Mice were treated with mAbs (as detailed below) injected on day 7, 11, 14, 18, 21 and 25 post tumor inoculation.

TABLE 10
Treatment dosages.

| # | | Dose | | Dose | | Vol/Dose |
|---|---|---|---|---|---|---|
| Group | Treatment/mAb 1 | (mg/Kg) | Treatment/mAb 2 | (mg/Kg) | # Dose | (μl) |
| 7 | mIgG1 iso Ctrl | 5 | Rat IgG2b iso Ctrl | 10 | 6 | 200 |
| 8 | Anti-PDL-1 | 5 | Rat IgG2b iso Ctrl | 10 | 6 | 200 |
| | mIgG1 | | | | | |
| 9 | Anti-PDL-1 | 5 | Anti-mPVRIg mAb | 10 | 6 | 200 |
| | mIgG1 | | 406 rIgG2b | | | |
| 10 | Anti-PDL-1 | 5 | Anti-mPVRIg mAb | 10 | 6 | 200 |
| | mIgG1 | | 407 rIgG2b | | | |

### Statistical Analysis:

[0592] Two-way ANOVA with repeated measures, followed by two way ANOVA with repeated measures for selected pairs of groups using JUMP (Statistical Discoveries™) software. Analyses of tumor growth measurements were performed by comparing tumor volumes measured on the last day on which all study animals were alive. Statistical differences in percentage of mice tumor free were determined by a Log Rank Mantel-Cox test. Values of P<0.05 were considered significant.

[0593] * p<0.05; ** p<0.01; *** p<0.001. For each experiment, the number of replicates performed and the number of animals per group are described in the corresponding figure legend(s) (FIGS. 47-48).

### Results

### Monotherapy Activity of Anti-mPVRIg and Anti-mPDL-1 in Syngeneic CT26 Tumor Model

[0594] We began preclinical assessment of anti-mPVRIg and anti-mPDL-1 monotherapy in mouse syngeneic CT26 tumor model. We treated mice with a mIgG1 isotype anti-PDL-1 antibody (YW243.55.S70) or with rIgG2b isotype anti-mPVRIg (mAbs 406 and 407).

[0595] In a semi-therapeutic treatment model of CT26 colon carcinoma, mono therapy with anti-PDL-1 was significantly efficacious (P<0.0001), eliciting a 70% of TGI compared to control mIgG1 isotype, greater rates of tumor rejection with rapid tumor rejection and durable antitumor immunity observed in a majority of mice (FIGS. 63A+B).

[0596] Groups treated with either anti mPVRIg mAb 406, and anti-mPVRIg mAb 407 showed similar tumor growth rates with no TGI over rIgG2b isotype (FIGS. 63A+B). Accordingly, anti-PDL-1 mIgG1 treatment prolonged the survival of mice (P<0.01, FIG. 63C), with 5 out of 10 individuals demonstrating a complete tumor clearance (FIG. 63B). No effect of anti-mPVRIg mAbs on survival rates was observed.

Activity of Anti-PVRIg and anti-PDL-1 Combination in Syngeneic Mouse Tumor Model

[0597] Next, we assessed the activity of anti-PVRIg and anti-PDL-1 combination therapy in mouse syngeneic tumor model.

[0598] In a therapeutic treatment model of CT26 colon carcinoma, administration of anti-PDL-1 with control rIgG2b isotype treatment, initiated on day 7 post inoculation, was not efficacious, while combination of anti-PVRIg mAb 407 with anti-PDL-1 elicited significant TGI (56%, P=0.0005), higher rates of tumor rejection with 4 out of 10 individuals demonstrating a complete tumor clearance (FIGS. 64A+B) and promoted better antitumor activity, with durable antitumor immunity detected (P<0.01, FIG. 64C). Combination of anti-PVRIg mAb 406 with anti-PDL-1 was partially efficacious, resulting a 33% of TGI, however, the anti-tumor response recorded was transient and no effect on survival rate was observed.

### Conclusions

[0599] The mPVRIg was predicted to play a role as a novel B7-like molecule and thus as a potential target for antibody based cancer immunotherapy. Several human in vitro experimental systems have demonstrated an immune-modulatory effect for mPVRIg. In the studies presented in this report we have evaluated the in vivo anti-cancer effect of mAbs directed against mPVRIg. In our study, treatment with 10 mg/kg (200 ug/mouse) of anti-mPVRIg as monotherapy in a minimal disease set-up, i.e. treatment initiation on day 4 (tumor mean of 40 mm³), did not result in TGI or survival advantage while positive control anti-PDL-1 mAb exhibited significant TGI and resulted prolonged survival.

[0600] Anti-mPVRIg mAbs were tested also in combination with anti-PDL-1 treatment. Treatment with 10 mg/kg (200 ug/mouse) was initiated on day 7, when tumors reach an average size of 75 mm³. Combination therapy of Anti-mPVRIg mAb 407 with anti-PDL-1 in therapeutic CT26 model exhibited tumor growth inhibition and prolonged survival of treated mice. The effect on tumor growth varied between individual mice with some individuals demonstrating a complete tumor clearance while other individuals exhibiting partial response (transient TGI) and some individuals were not responsive. An in vivo effect of anti-mPVRIg and anti-mPDL-1 combination treatment was also shown in MC38 and B16-D^{b}/gp100 tumor models (data not shown).

[0601] Additional in vivo studies are planned to assess dose dependencies and efficacy in additional syngeneic models or in combination with additional treatment compounds or regimens.

### J. Example 10

### TIGIT Therapeutic Antibody Discovery by Phage Display

[0602] 1. Introduction

[0603] A phage display antibody discovery campaign was conducted to isolate human TIGIT binders from a naïve human fab library using recombinant human TIGIT extra-cellular domain as target antigen. Forty-five novel human TIGIT-specific antibodies were isolated and generated as human IgG4, inclusive of an optional S241P in the hinge region as discussed herein. The resulting antibodies were screened for their ability to block the TIGIT-PVR interaction and for cross-reactivity with cell-expressed cynomolgus TIGIT by flow cytometry. Two of these antibodies were further optimized for higher human and cynomolgus TIGIT binding affinity.

[0604] 2. Protocols

[0605] Antigens for antibody discovery by phage display: Two formats of human TIGIT protein were used as antigens in phage display. The first comprised of the human TIGIT ECD (Met22-Pro141) fused to a C-terminal polyhistidine tag (hTIGIT-HIS) and was either generated in-house or sourced commercially from Sino Biological Inc. The second antigen format comprised of the human TIGIT ECD fused to a human IgG1 Fc domain at the C-terminus (hTIGIT-hFc) and was either generated in-house or sourced commercially from R&D Systems.

[0606] Functional QC of antigens: The recombinant TIGIT antigens used for biopanning were functionally validated by their ability to bind to human PVR, the ligand of human TIGIT. Biotinylated antigens were tested for PVR binding, either by ELISA or flow cytometry. Biotinylated hTIGIT-HIS was validated by its ability to bind hPVR-hFc (Sino Biological Inc.) by ELISA. Biotinylated hTIGIT-hFc was validated by flow cytometry for its ability to bind endogenously surface expressed PVR on Expi293 cells.

[0607] Phage panning of human antibody library: Two phage campaigns, utilizing either human TIGIT-HIS (campaign 1) or human TIGIT-hFc (campaign 2) as antigens, were executed. Panning reactions were carried out in solution, using streptavidin-coated magnetic beads to display the biotinylated TIGIT antigens. Both campaigns used a human fab antibody phage display library for initial discovery. Three rounds of panning were carried out using the respective human TIGIT antigens, with higher wash stringency and lower antigen concentrations in each successive round of panning. Antibody CPA.9.002, generated in campaign 1, was optimized for improved human TIGIT binding by generating a phage library by saturation mutagenesis of L-CDR3 and panning the resulting library against human TIGIT-HIS (campaign 3). Two antibodies, CPA.9.059 and CPA.9.027, generated in campaigns 2 and 3, respectively, were also optimized for improved human TIGIT affinity and cyno TIGIT cross-reactivity (campaign 4). For each antibody, a phage library was generated by saturation mutagenesis of two CDRs (any combination of H-CDR1, H-CDR2, H-CDR3, L-CDR1, or L-CDR3). The resulting phage libraries were panned for four rounds against human TIGIT-HIS and C-terminal HIS-tagged cyno TIGIT ECD recombinant protein in alternating rounds of panning. The panning antigens used were as follows: 1 nM human TIGIT-HIS in round 1, 1 nM cyno TIGIT-HIS in round 2, 0.1 nM human TIGIT-HIS in round 3, and 0.1 nM cyno TIGIT-HIS in round 4.

[0608] Binding screens using antibodies expressed as fab fragments: The phagemid construct contains an amber stop codon that allows it to function as a fab expression vector. Transformation of these vectors into E. coli and induction with isopropyl β-D-1-thiogalactopyranoside (IPTG) results in periplasmic expression of soluble fab molecules. Fab proteins secreted into the E. coli periplasm were extracted by osmotic shock for binding screens.

[0609] Primary screen by ELISA: The fab PPE extracts were tested for binding to the panning antigen hTIGIT-HIS or hTIGIT-hFc by ELISA. The positive hits from the ELISA screen were sequenced using heavy chain and light chain-specific primers. The sequences were assembled and analyzed. Clones were deemed sequence-unique if there were more than one non-conservative differences in heavy chain CDR3.

[0610] Secondary screen by flow cytometry: The sequence-unique ELISA-positive fab clones were selected and analyzed for their ability to bind human TIGIT over-expressing Expi293 cells by flow cytometry. Parental Expi293 cells were used as a negative control for each fab sample.

[0611] Re-formatting of fab hits and production as human IgG4 molecules: Potential human TIGIT binding fabs were converted to full length human IgG4 (including a S241P hinge mutant, see Aalberse et al., Immunology 202 105:9-19, hereby incorporated by reference in its entirety, and in particular for the discussion of S241P and references 1, 2 and 3 cited therein) for further characterization. Protein expression constructs were derived by PCR-amplification of variable heavy and light chain sequences, which were sub-cloned into pUNO3 vector (Invivogen).

[0612] 3. Results

[0613] Functional QC of the human TIGIT recombinant proteins: The hTIGIT-HIS and hTIGIT-hFc recombinant proteins, either generated in-house or sourced commercially, were functionally validated by their ability to bind to human PVR. Human PVR (Fc-conjugated) showed a dose-dependent binding to biotinylated hTIGIT-HIS in ELISA (data not shown). Similar binding was observed in the reverse orientation where PVR was immobilized on the ELISA plate and hTIGIT-HIS was in solution (data not shown).

[0614] The hTIGIT-hFc protein was functionally validated by binding to PVR in a flow cytometry assay. In this assay, the hTIGIT-hFc protein was titrated against Expi293 cells that endogenously express human PVR. The interaction was detected using an anti-hFc secondary antibody conjugated to AF647 fluorescence label. An irrelevant Fc protein was used as a control (data not shown).

[0615] Functional assays were done on a number of the candidates as is described in the Examples below.

[0616] Affinity maturation binding screens using antibodies expressed as fab fragments: Eight 96-well plates of periplasmic extracted fab clones were analyzed for the de novo campaigns (1 and 2). Seventy-three unique clones were identified in campaign 1 using the hTIGIT-HIS protein as target antigen. Secondary screening of the 73 ELISA positive Bones by flow cytometry identified 21 positive for binding to human TIGIT over-expressing Expi293 cells. A similar screen for campaign 2 (hTIGIT-hFc as target antigen) yielded 37 ELISA-positive clones, 24 of which were also positive for binding to human TIGIT over-expressing Expi293 cells, by flow cytometry (FIG. 52).

[0617] Two 96-well plates of fab clones (as PPEs) were screened for the optimization/affinity maturation campaigns (3 and 4). The ELISA-positive unique variants were screened for binding to human and/or cynomolgus TIGIT over-expressing Expi293 cells in flow cytometry. The binding affinities of the top clones to the hTIGIT-HIS protein was also evaluated by Surface Plasmon Resonance (SPR). The first cycle of affinity maturation of CPA.9.002 antibody yielded 5 new antibodies, CPA.9.021, CPA.9.027, CPA.9.044, CPA.9.048, and CPA.9.049, with mutations in the L-CDR3 and at least 3-fold improvement in the binding affinity for recombinant human TIGIT. A second cycle of optimization of CPA.9.027 antibody yielded 4 new antibodies with at least 25-fold improvement in binding to recombinant human TIGIT. The new variants showed mutations in the H-CDR2 and L-CDR3 (CPA.9.083 and CPA.9.086) and additionally in the L-FR4 for CPA.9.089 and CPA.9.093. Optimization of CPA.9.059 resulted in two new antibodies, CPA.9.101 and CPA.9.103, with significantly improved binding to cynomolgus TIGIT as well as a significant improvement in the human TIGIT binding for CPA.9.103. The mutations were observed in H-CDR3 and L-CDR1 for both the new variants. Additionally, minor changes in L-FR1 were observed for CPA.9.101.

[0618] Reformatting of the ELISA and FACS positive fabs into hIgG4: Forty-five unique fabs positive for ELISA and flow cytometry human TIGIT binding were reformatted for expression as human IgG4 molecules, inclusive of an optional S241P hinge variant as discussed herein. In addition, 11 affinity optimized variants were also reformatted as IgG4. The sequences of selected phage-derived antibodies are shown in FIG. 53. The sequences of two benchmark antibodies, BM26 (WO2016/028656, Clone 31C6) and BM29 (US2016/0176963, Clone 22G2) are also shown in FIG. 53 for comparison. The reformatted antibodies were evaluated for binding to human TIGIT over-expressing Expi293 cells and a binding curve was generated to calculate the equilibrium binding constant (KD). These antibodies were also evaluated for binding to cyno TIGIT over-expressing Expi293 cells as well as their ability to block the interaction between human TIGIT and human PVR in cell-based assays. Based on these characterization, a subset of these antibodies were selected for in vitro functional assays as more fully described below.

### K. Example 11

### TIGIT Therapeutic Antibody Discovery by Hybridoma

[0619] 1. Rationale and Objectives

[0620] Hybridoma technology using known and standard methods in the field was used to generate murine antibodies that bind to human TIGIT with high affinity, are cross-reactive with non-human primate (cynomolgus macaque, Macaca fascicularis, referred to as cyno) TIGIT, and block the interaction of TIGIT with its ligand, PVR (CD155).

[0621] 2. Summary

[0622] Balb/c mice were immunized with recombinant forms of human and cyno TIGIT extra-cellular domain proteins. Cells isolated from the spleen and lymph nodes of immunized mice were fused with the Sp2/0 myeloma cell line to generate hybridomas that secrete murine antibodies. Supernatants from polyclonal and sub-cloned monoclonal hybridomas were screened for binding to human and cyno TIGIT-overexpressing Expi293 cells and for binding affinity for human and cyno TIGIT recombinant proteins using standard SPR methods. Murine antibodies from selected hybridomas were purified and characterized extensively in binding and functional assays. Five functional and cyno cross-reactive murine antibodies were humanized to contain a hIgG4 framework (inclusive of an optional hinge variant as outlined herein) and isotype. The sequences are shown in FIG. 53.

### L. Example 12

### FACS KD Measurements of Phage and Hybridoma-Derived Antibodies Binding to Cells Over-Expressing Human and Cyno TIGIT

[0623] 1. Protocols

[0624] The following cell lines were prepared to estimate the binding affinities of human phage and mouse anti-TIGIT antibodies: Expi293 Parental, Expi293 human TIGIT over-expressing, and Expi293 cyno TIGIT over-expressing. The following hybridoma and phage antibodies were each prepared in an 11-point 2-fold serial dilution series at a binding site concentration range of 195 pM-200 nM:

[0625] Phage generated antibodies: CPA.9.027, CPA.9.049, CPA.9.059.

[0626] Hybridoma generated antibodies (pre-humanization): CHA.9.536, CHA.9.541, CHA.9.543, CHA.9.546, CHA.9.547 and CHA.9.560. Included were two different benchmark antibodies, BM26 (WO2016/028656A1, Clone 31C6 as mouse IgG1) and BM29 (US2016/0176963A1, Clone 22G2 as mouse IgG1).

[0627] The 12th well of each titration contained buffer only to serve as background. Each cell type was incubated with an anti-human TIGIT mAb for 60 minutes at 4° C. After washing, AF647-tagged goat anti-human F(ab′) (Jackson Immunoresearch) and AF647-tagged goat anti-mouse IgG-Fc (Southern Biotech #1030-30) were added to cells incubated with human and mouse mAbs, respectively. A FACS Canto II HTS instrument then recorded the Geometric Mean Fluorescence Intensity (gMFI) of 5000-10,000 events for each well. A plot of the gMFI as a function of the human PVR molecular concentration was fit using Graphpad Prism's “one site, specific binding” model to estimate the KD and the 95% confidence intervals of each nonlinear fit.

[0628] 2. Results

[0629] The two independent FACS KDs measured for each mAb differed by no more than 2-fold on average. A single representative measurement for KD along with the 95% confidence interval of the binding isotherm fit is listed for each mAb for human and cyno over-expressing cells in FIG. 54 and FIG. 55, respectively. CPA.9.059 did not show binding to the cyno over-expressing cells. It should be noted that the binding site concentrations (2× the molecular concentration) for all mAbs are used for the nonlinear curve-fitting, which means the assumption is made that this FACS KD method is measuring the binding site constant (kD) rather than the molecular or stoichiometric binding constant.

### M. Example 13

### FACS Blocking Assay of Phage and Hybridoma-Derived Anti-Human TIGIT mAbs Inhibiting PVR-FC Binding to TIGIT

[0630] 1. Introduction

[0631] The purpose of this assay is to characterize phage and hybridoma-derived anti-human TIGIT antibodies' ability to inhibit the binding of human PVR to human TIGIT over-expressed on a cell surface. First, the human TIGIT-human PVR binding affinity will be determined by FACS. The binding isotherms showed the saturating concentration of human PVR which was used for the blocking assays. Next, cells over-expressing human TIGIT cells were titrated with phage and hybridoma-produced anti-TIGIT mAbs, followed by adding a saturating concentration of human PVR. Anti-human TIGIT antibody binding on the over-expressing cells were then measured using FACS.

[0632] 2. Protocols

[0633] FACS KD Assay: Various human PVR-Fc isotypes were tested via FACS for optimal binding and it was determined human PVR-h1Fc (Sino Biological #10109-H20H) and human PVR-m2aFc (Compugen) showed the highest binding levels to human TIGIT over-expressing cells. The two PVR isotypes were each 2-fold serially diluted over an 11-point titration series at a final molecular concentration range of 98 pM-100 nM. The 12th well of each titration contained buffer only to serve as background. Each cell type was incubated with mAb for 60 minutes at 4° C. while. After washing, AF647-tagged F(ab′)2 fragment goat-anti human Fc (Jackson Immunoresearch #109-606-098) and AF647-tagged goat anti-mouse IgG (SouthernBiotech #1033-31) were added to wells titrated with human and mouse anti-TIGIT mAbs, respectively. A FACS Canto II HTS instrument then recorded the Geometric Mean Fluorescence Intensity (gMFI) of 5000-10,000 events for each well. A plot of the gMFI as a function of the human PVR molecular concentration was fit using Graphpad Prism's “one site, specific binding” model to estimate the KD and the 95% confidence intervals of each nonlinear fit. Results of human PVR-m2aFc and human PVR-h1Fc are shown in FIGS. 57A and B, respectively.

[0634] Phage MAbs Blocking Assay: The following phage-derived hIgG4 antibodies and benchmark mAbs were each prepared in a three-point 5-fold serial dilution series at a binding site concentration range of 267 pM-6.7 nM: CPA.9.027, CPA.9.049 and CPA.9.059, as well as BM26 (WO2016/028656A1, Clone 31C6 as hIgG4) and Synagis hIgG4 (negative isotype control).

[0635] The 4th well of each titration contained buffer only to serve as a background. Cells were incubated with mAb for 15 minutes at 4° C. Human PVR-m2aFc (Compugen) was then incubated for 1 hour at 4° C. After washing, AF647-tagged goat anti-mouse IgG (SouthernBiotech #1033-31) was added. A FACS Canto II HTS instrument then recorded the Geometric Mean Fluorescence Intensity (gMFI) of 5000-10,000 events for each well. The gMFI values of bound human PVR for the cells pre-incubated with the mAbs were compared to gMFI values of cells pre-incubated with the blocking benchmark mAb and non-blocking control mAb. If a phage antibody reduced the human PVR-m2aFc binding signal compared to the signal from the titration with the known non-blocking mAb, the antibody was characterized as blocking PVR binding at that concentration of phage mAb. The blocking trends of the phage mAbs were similar to the PVR blocking with the BM26 benchmark (FIG. 58).

[0636] Hybridoma MAbs Blocking Assay: The following hybridoma antibodies were each prepared in an 11-point 2.5-fold dilution series at a binding site concentration range of 14 pM-133 nM: CHA.9.536, CHA.9.541, CHA.9.546, CHA.9.547, CHA.9.560, BM26 (WO2016/028656A1, Clone 31C6 as mouse IgG1) and BM29 (US2016/0176963A1, Clone 22G2 as mouse IgG1).

[0637] The 12th well of each titration contained buffer only to serve as background. Cells were incubated with mAb for 15 minutes at 4° C. Human PVR-h1Fc (Sino Biological #10109-H20H) was then added, and the cells were then incubated for 1 hour at 4° C. After washing, AF647-tagged F(ab′)2 fragment goat-anti human Fc (Jackson Immunoresearch) was added. A FACS Canto II HTS instrument then recorded the Geometric Mean Fluorescence Intensity (gMFI) of 5000-10,000 events for each well. A plot of the gMFI as a function of the mAb binding site concentration was fit nonlinearly using Graphpad Prism's “log(inhibitor) vs. response—Variable slope (four parameters)” model to estimate the IC50 of each nonlinear fit. This experiment was repeated twice over two days.

[0638] 3. Results

[0639] FIGS. 58 and 59 demonstrate that both the phage and hybridoma antibodies potently block the binding of human PVR-Fc to human TIGIT over-expressed on the cell-surface of Expi293 cells. The blocking activity of the phage and hybridoma antibodies is comparable to the two benchmark antibodies tested, BM26 and BM29.

### N. Example 14

### Surface Plasmon Resonance (SPR) Kinetics Studies of Nine Phage- and Hybridoma-Derived mAbs Binding to Human, Cyno, and Mouse TIGIT

[0640] 1. Protocols

[0641] All experiments were performed using a ProteOn XPR 36 instrument at 22° C. First, high density capture surfaces were prepared with goat anti human Fc polydonal antibody (Thermo #H10500) and rabbit anti mouse antibodies (GE Healthcare #BR100838), respectively, immobilized over all vertical capture lanes and horizontal interspots on separate GLC chips using standard amine coupling. Typical immobilization levels for the anti-human capture pAb and the anti-mouse capture antibody for each GLC chip were around 5000 RU. Human TIGIT was obtained from Sino Biologicals while mouse TIGIT monomer and cyno TIGIT monomer were prepared in-house. The purified mAbs studied for binding to human, mouse, and cyno TIGIT are listed below:

[0642] Phage antibodies: CPA.9.027, CPA.9.049 and CPA.9.059

[0643] Hybridoma antibodies: CHA.9.536, CHA.9.541, CHA.9.543, CHA.9.546, CHA.9.547 and CHA.9.560

[0644] Benchmark comparisons: BM26 (WO2016/028656A1, Clone 31C6 as hIgG4) and BM29 (US2016/0176963A1, Clone 22G2 as hIgG4).

[0645] Each mAb was diluted to ˜0.5 μg/mL in running buffer which was 1× PBST with filtered BSA added to a final concentration of 100 μg/mL. For each “single-shot kinetics” cycle on the ProteOn instrument, a different mAb was captured over one of the six unique vertical capture lanes for approximately 1.5-2.5 minutes. After switching the buffer flow of the ProteOn to the horizontal direction, capture surfaces were stabilized for approximately 15-20 minutes. Six concentrations of a 3-fold dilution series of human TIGIT (346 pM-84.1 nM), cyno TIGIT (371 pM-90.2 nM), or mouse TIGIT (382 pM-92.9 nM) were injected for 2 minutes followed by 20 minutes of dissociation at a flow rate of 50 μL/min. An identical buffer injection preceded each series of injected antigen for double-referencing. Anti-human antibody surfaces were regenerated with two 30-second pulses of 146 mM phosphoric acid and anti-mouse antibody capture surfaces were regenerated with two 30-second pulses of 10 mM glycine, pH 1.7. The sensorgrams of TIGIT antigen injected over captured mAbs were processed using a ProteOn version of Scrubber and were fit to a 1:1 kinetic binding model including a term for mass transport.

[0646] FIG. 56 shows the resulting kinetic rate constants and the equilibrium dissociation constants where data were reliable enough to estimate the binding constants (sensogram data not shown). The asterisks indicate the kd values that had to be held constant at 1.00×10−5 /sec. In cases such as done CHA.9.560 binding to human TIGIT, the kinetic model was able to estimate a Kd, but it is it virtually impossible to accurately estimate a Kd on the order 1×10⁻⁶/sec after only 20 minutes of dissociation data given the sensitivity of the instrumentation.

### O. Example 15

### Functional Analyses of Anti-TIGIT Antibodies

[0647] 1. Rationale and Objectives

[0648] To functionally characterize the ability of anti-human TIGIT antibodies to inhibit the interaction of TIGIT and its ligand PVR, and to consequently enhance human T cell activation either as a monotherapy or in combination with an anti-human PVRIG antibody, CHA.7.518.1.H4(S241P).

[0649] 2. Protocols

[0650] Human TIGIT/CD155 Turkat IL-2 Luciferase Reporter Assay: The human TIGIT/PVR Jurkat IL-2 luciferase reporter bioassay kit (Promega) was utilized to assess the effect of anti-human TIGIT antibody treatment on T cell activation. Jurkat T cells were stably transfected with recombinant human TIGIT and a luciferase reporter gene driven by the IL-2 response element (IL-2-RE). The stimulator cells were artificial APC (aAPC) CHO-K1 cells expressing recombinant human PVR, and an engineered cell surface protein designed to activate TCR-mediated signaling in an antigen-independent manner. Following co-culture of these cells, the human TIGIT/human PVR interaction inhibits TCR signaling and IL-2-RE-mediated luminescence. Addition of an anti-human TIGIT antibody that blocks the human TIGIT/human PVR interaction releases the inhibitory signal, resulting in T cell activation and IL-2-RE-mediated luminescence. The assay was carried out according to the manufacturer's instructions. Briefly, aAPC CHO-K1 human PVR cells were thawed in a 37° C. water bath and diluted in F-12 medium supplemented with 10% FBS (Promega). 25,000 cells/well were plated on white, flat-bottom tissue culture treated 96 well plates (Costar). Plates were then incubated overnight at 37° C. The next day, hybridoma and phage-derived anti-human TIGIT antibodies, mouse IgG1 (mIgG1) and hIgG4 isotype control antibodies, or benchmark (BM) anti-human TIGIT antibodies were added either as a single dose at 10 μg/ml, or in a 10 point, 2-fold dilution series starting at 20 μg/ml. Jurkat IL-2-RE luciferase human TIGIT cells were thawed in a 37° C. water bath and diluted in RPMI medium supplemented with 10% FBS (Promega). 125,000 Jurkat cells were added to each well. Plates were then incubated at 37° C. with 5% CO2 for 6 hours. After the incubation, plates were removed from the incubator and allowed to equilibrate to room temperature for 30 minutes. 80 μl of Bio-Glo luciferase substrate (Promega) was added to each well and the mixture was allowed to equilibrate for 10 minutes at room temperature protected from light. Luminesce was quantified on an EnVision multi-label reader (Perkin Elmer) with an ultra-sensitive luminescence detector. Luminesce signal was reported in relative light units (RLU).

[0651] Human CMV-Specific CD8⁺ T Cell Expansion: Human CMV-reactive peripheral blood mononuclear cells (PBMCs) (CTL) were thawed, resuspended at 2×10⁶ cells/ml, and stimulated with 1 μg/ml of the CMV pp65 peptide (Anaspec) in complete RPMI medium supplemented with 2 ng/ml recombinant human IL-2 (R&D systems) and 10 ng/ml recombinant human IL-7 (R&D systems) at 37° C. with. After 9 days, cells were split 1:2 and rested with low dose human IL-2 (100 IU/ml). The frequency of CMV-specific CD8⁺ T cells was determined with the CMV pp65/HLA-A2 tetramer (MBL). CMV-specific CD8⁺ T cells that were 65-98% tetramer positive were utilized in assays between days 12 and 16 following CMV peptide stimulation.

[0652] Human CMV-Specific CD8⁺ T cell Co-Culture Assay with Human PVR-Expressing Melanoma Cell Lines: An in vitro co-culture assay with human CMV-specific CD8+ T cells was utilized to assess the effect of anti-human TIGIT antibodies on antigen-specific cytokine secretion. The target cell line used in the assay was the HLA-A2⁺ melanoma cell line, Mel624 stably transduced with a lentivirus containing human PVR DNA (System Biosciences). A stable pool of Mel624 human PVR over-expressing cells were pulsed with the CMV pp65 peptide at 0.0033 μg/ml or 0.001 μg/ml at 37° C. for 1 hour. Cells were then washed and plated at 50,000 cells/well. Hybridoma and phage derived anti-human TIGIT antibodies, control mIgG1 or hIgG4 isotype antibodies, or BM anti-human TIGIT antibodies were added at a concentration of 10 μg/ml. Human CMV-specific CD8⁺ T cells from three different donors, specified as Donor 2, Donor 4, and Donor 210 were expanded according to the protocol above. 50,000 human CD8⁺ T cells were added to each well. Co-cultures were incubated at 37° C. with 5% CO2 for 24 hours. After the incubation, plates were centrifuged at 1200 rpm for 1 minute and the supernatant was collected. The amount of human interferon gamma (IFNγ) in the co-culture supernatant was measured by flow cytometry using a cytometric bead assay (BD).

[0653] Human CMV-Specific CD8⁺ T cell Co-Culture Assay with Human PVR- and Human PVRL2 (CD112)-Expressing Melanoma Cell Lines: The combined effect of anti-human TIGIT antibodies and CHA.7.518.1.H4(S241P), an anti-human PVRIG antibody, on antigen-specific cytokine secretion was assessed by an in vitro co-culture assay with human CMV-specific CD8⁺ T cells similar to the assay described above. The target cell line used in the assay was the HLA-A2⁺ melanoma cell line, Mel624, which stably expressed human PVR and human PVRL2, the ligands for TIGIT and PVRIG, respectively, through lentiviral transduction (System Biosciences). The human PVR and human PVRL2 overexpressing Mel624 cells were pulsed with the CMV pp65 peptide at 0.0033 μg/ml or 0.001 μg/ml at 37° C. for 1 hour. Cells were then washed and plated at 50,000 cells/well. Hybridoma and phage derived anti-human TIGIT antibodies, or a BM anti-human TIGIT antibody, were added to the culture in combination with CHA.7.518.1.H4(S241P) or a control hIgG4 isotype antibody at 10 μg/ml. Human CMV-specific CD8⁺ T cells from three different donors, specified as Donor 4, Donor 25, and Donor 210 were expanded, according to the protocol above. 50,000 human CD8⁺ T cells were added to each well. Co-cultures were incubated at 37° C. for 24 hours. After the incubation, plates were centrifuged at 1200 rpm for 1 minute and the supernatant was collected. The amount of human interferon gamma (IFNγ) in the co-culture supernatant was measured by flow cytometry using a cytometric bead assay (BD).

[0654] 3. Results

[0655] Anti-Human TIGIT Antibodies Enhance IL-2 Signaling: The ability of hybridoma and phage-derived anti-human TIGIT antibodies to enhance IL-2 signaling was assessed with the human TIGIT/human PVR Jurkat luciferase reporter assay. FIG. 60 and FIG. 62 demonstrate the effect of 10 μg/ml phage or hybridoma-derived anti-human TIGIT antibodies on IL-2 signaling, respectively. Three phage-derived antibodies, CPA.9.027, CPA.9.049, and CPA.9.059 robustly enhanced IL-2 signaling compared to the hIgG4 isotype control. In addition, all three phage antibodies induced more IL-2 signaling compared to the BM anti-human TIGIT antibodies, BM26 and BM29. The five hybridoma-derived antibodies, CHA.9.536, CHA.9.541, CHA.9.546, CHA.9.547 and CHA.9.560 also induced IL-2 signaling compared to the mIgG1 isotype control. Of note, the five hybridoma antibodies induced similar IL-2 signaling compared to BM26 and BM29. The anti-human TIGIT non-blocking antibody, CHA.9.543 did not significantly increase IL-2 signaling. To determine whether the effect of anti-TIGIT antibodies was dose-dependent, the assay was carried out with a 10 point, 2-fold dilution series for each antibody starting at 20 μg/ml (FIGS. 61 and 63). IL-2 signaling decreased in a dose-dependent manner with all eight anti-human TIGIT antibodies, as well as BM26 and BM29.

[0656] Anti-Human TIGIT Antibodies Increase IFNγ Secretion from Human CMV-Specific CD8+ T Cells: The ability of hybridoma and phage-derived anti-human TIGIT antibodies to modulate IFNγ secretion was assessed with the CMV-specific T cell/Mel624 co-culture assay. FIG. 64 shows the effect of the anti-human TIGIT antibodies on IFNγ secretion. Three phage-derived antibodies, CPA.9.027, CPA.9.049, and CPA.9.059 enhanced IFNγ secretion compared to the media alone and hIgG4 isotype control antibody. Additionally, five hybridoma derived antibodies, CHA.9.536, CHA.9.541, CHA.9.546, CHA.9.547 and CHA.9.560 also increased IFNγ production compared to the mIgG1 isotype control antibody. The phage and hybridoma-derived TIGIT antibodies induced IFNγ in a similar manner to BM26 and BM29. As expected, the anti-human TIGIT non-blocking antibody, CHA.9.543 did not significantly effect IFNγ secretion.

[0657] FIG. 65 shows the combined effect of the anti-human TIGIT antibodies and CHA.7.518.1.H4(S241P) on IFNγ secretion. Three phage-derived antibodies, CPA.9.027, CPA.9.049, and CPA.9.059, and five hybridoma derived antibodies, CHA.9.536, CHA.9.541, CHA.9.546, CHA.9.547 and CHA.9.560, including BM26, all enhanced IFNγ secretion compared to their respective isotype control antibodies, when either treated alone, or in combination with CHA.7.518.1.H4(S241P). The anti-human TIGIT non-blocking antibody, CHA.9.543 resulted in less IFNγ secretion compared to other anti-human TIGIT antibodies. The percent increase of IFNγ secretion in each antibody over respective isotype control antibodies is summarized in FIG. 66. A syergistic effect is observed in the combined treatment of anti-human TIGIT antibodies and CHA.7.518.1.H4(S241P).

[0658] 4. Summary and Conclusions

[0659] Addition of anti-human TIGIT antibodies to the human TIGIT/human PVR Jurkat reporter assay induced a robust, dose-dependent increase in IL-2 signaling. Additionally, the anti-human TIGIT antibodies increased IFNγ secretion from human CMV-specific CD8+ T cells when co-cultured with Mel624 human PVR cells. The secretion of IFNγ was further increased by anti-human TIGIT antibodies in combination with an anti-human PVRIG antibody. Taken together, these data demonstrate that the anti-human TIGIT antibodies can block TIGIT-mediated suppression of human T cell activation, and T cell activation is enhanced by co-blockade of both TIGIT and PVRIG.

### P. Example 16

### Binning Analysis of Anti-TIGIT Antibodies

[0660] 1. Protocols

[0661] Experiments were performed by Wasatch Microfluidics Inc. (Salt Lake City, Utah) using a Continuous Flow Microspotter (CFM) and an IBIS MX96 SPR Imager (MX96 SPRi). The following anti-human TIGIT mAbs and human PVR-Fc variants were each diluted to ˜10 μg/mL in 10 mM sodium acetate, pH 5.0 and covalently immobilized using standard amine coupling on independent spots of a Xantec 200M biosensor prism chip for 7-minute cycles using the CFM:

| | |
|---|---|
| 1 | CPA.9.009-H4 |
| 2 | CPA.9.011-H4 |
| 3 | CPA.9.012-H4 |
| 4 | CPA.9.013-H4 |
| 5 | CPA.9.014-H4 |
| 6 | CPA.9.015-H4 |
| 7 | CPA.9.018-H4 |
| 8 | CPA.9.027-H4 |
| 9 | CPA.9.049-H4 |
| 10 | CPA.9.053-H4 |
| 11 | CPA.9.057-H4 |
| 12 | CPA.9.059-H4 |
| 13 | CPA.9.064-H4 |
| 14 | CPA.9.069-H4 |
| 15 | CPA.9.071-H4 |
| 16 | CPA.9.077-H4 |
| 17 | CPA.9.081-H4 |
| 18 | CHA.9.519 |
| 19 | CHA.9.521 |
| 20 | CHA.9.522 |
| 21 | CHA.9.527 |
| 22 | CHA.9.528 |
| 23 | CHA.9.529 |
| 24 | CHA.9.535 |
| 25 | CHA.9.536 |
| 26 | CHA.9.541 |
| 27 | CHA.9.546 |
| 28 | CHA.9.547 |
| 29 | CHA.9.549 |
| 30 | CHA.9.552 |
| 31 | CHA.9.554 |
| 32 | CHA.9.555 |
| 33 | CHA.9.560 |
| 34 | CHA.9.525 |
| 35 | CHA.9.538 |
| 36 | CHA.9.543 |
| 37 | CHA.9.553 |
| 38 | CHA.9.556 |
| 39 | CHA.9.561 |
| 40 | BM8-H4 |
| 41 | BM9-H4 |
| 42 | BM26-H4 |
| 43 | BM29-H4 |
| 44 | MBSA43-M1 |
| 45 | PVR-Fc M2A |
| 46 | Sino PVR-Fc |

[0662] BM8-H4 and BM9-H4 refer to (US2015/0216970A1, Clones 10A7 and 1F4 reformatted as hIgG4), respectively. MBSA43-M1 is a mouse anti-human TIGIT IgG1 from eBioscience. The prism chip was then rinsed with 1× PBST for 3 minutes and then directly loaded into the MX96 SPRi imager where excess NHS esters were quenched with a 5-minute injection of 1 M ethanolamine. Preliminary experiments included several cycles of injecting 100 nM monomeric human TIGIT (Sino Biologicals, Cat #10917-H08H) over all immobilized mAbs for four minutes followed by regeneration in order to test the binding activity of the antibodies and to best determine the regeneration conditions by assessing reproducibility of the TIGIT binding. These preliminary experiments showed that the best reagent to reproducibly regenerate most of the immobilized mAbs was a 30-second pulse of 1/500 phosphoric acid. The immobilized PVR, however, did not retain activity and therefore their blocking patterns were generated and “binned” as analytes in solution only. In these preliminary experiments and the binning experiments described below, all protein samples were prepared in the running buffer which was degassed HBST. A “sandwich” epitope binning protocol was performed where each mAb and PVR was injected over TIGIT pre-complexed to each immobilized mAb to determine whether or not the immobilized mAb blocks the mAb in solution from binding to TIGIT. For each cycle 100 nM of TIGIT was first injected over all immobilized mAbs for 4 minutes followed immediately by a 4-minute injection of a competitor mAb or ligand at 274 nM (binding site concentration). This was repeated with each mAb and PVR acting as the competitor analyte. Control cycles with running buffer instead of competitor protein were performed after every 12 cycles for double-referencing. All surfaces were regenerated after each cycle with a 30 second pulse of 1/500 phosphoric acid. Sensorgram data were processed and referenced using Wasatch's proprietary software. An antibody pair was classified as having a shared TIGIT-binding epitope if no binding was observed from the injection of competitor over TIGIT pre-complexed to immobilized mAb. An antibody pair was classified as binding to different epitopes on TIGIT, or “sandwiching”, if the injection of competitor mAb showed binding to the pre-complexed TIGIT. Low or minimal binding of competitor was classified as an “intermediate” blocker. Hierarchical clustering of the pair-wise TIGIT blocking patterns for each mAb and ligand was performed using Wasatch's proprietary software.

[0663] 2. Results

[0664] Both PVR-Fc proteins and 13 of the mAbs either lost activity or could not be regenerated as ligands so their blocking patterns were determined as analytes in solution only. MAb CPA.9.014-H4 was not binned because it showed no binding to TIGIT. FIG. 67 shows the dendrogram clustering based on the pair-wise blocking patterns for each mAb and two PVR proteins. The vertical axis represents the statistical similarity factor in the blocking patterns. Wasatch Microfluidics applied a cut-off factor of 5 to duster the mAbs which is indicated by the line in FIG. 67. For the strictest definition of an epitope “bin” where only those mAbs (and PVRs) which show identical blocking patterns bin together, there are a total of 12 discrete bins. If blocking patterns that show only minimal differences are clustered together, there are four closely related “communities” of mAbs and PVRs. These “communities” are indicated with different shaded blocks on the bottom of FIG. 67. FIG. 68 groups together the mAbs and PVRs that populate each discrete, unique bin with each bin indicated by a black box. Gray boxes surround all the unique bins that make up each “community” of related blocking patterns. The mAbs and PVRs in FIG. 68 are listed with the number key which represents each protein in the dendrogram in FIG. 67.

### Q. Example 17

### Administration of Anti-PVRIG Antibodies to TIGIT Knock Out Mice

### Rationale and Objectives

[0665] To examine whether TIGIT deletion in combination with mouse PVRIG blockade can enhance tumor growth inhibition and survival in a syngeneic mouse tumor model.

### Protocols

### Animals

[0666] TIGIT knockout (KO) mice were generated at Ozgene Pty LTD (Australia). C57BL/6 wild type (WT) mice (Ozgene) served as controls. Eight to eleven weeks old female TIGIT KO and C57BL/6 mice were used. All studies were approved by the Institutional Animal Care and Use Committee at the Tel-Aviv University (Tel-Aviv, Israel).

### In Vivo Tumor Models

[0667] 1×105 B16/Db-hmgp100 melanoma cells were inoculated subcutaneously (s.c.) into the right flank of C57BL/6 WT or TIGIT KO mice. Antibody treatment was initiated on the same day as tumor inoculation (day 0), with 7-10 mice per treatment group. Antibodies used were the mouse IgG1 isotype control (Clone MOPC-21 BioXcell), and mouse IgG1 anti-mouse PVRIG (Clone 407, Compugen LTD). Antibodies were administrated at 10 mg/kg by intra-peritoneal injection, twice per week for 3 weeks. Tumor growth was measured with electronic caliper every 2-3 days and was reported as 0.5×W2×L mm3 (L is length and W is width of the tumor). Animals reaching 2250 mm3 tumor size were anesthetized.

### Statistical Analysis

[0668] Two-way ANOVA with repeated measures, followed by two-way ANOVA with repeated measures for selected pairs of groups was performed using JUMP software (Statistical Discoveries™). Analyses of tumor growth measurements were performed by comparing tumor volumes measured on the last day on which all study animals were alive. Statistical differences in percentage of mice tumor free were determined by a Log Rank Mantel-Cox test. Values of P<0.05 were considered significant. * p<0.05; ** p<0.01; *** p<0.001.

### Results

[0669] In Vivo Tumor Growth Inhibition Following Treatment with Anti-Mouse PVRIG Blocking Antibody in TIGIT KO Mice

[0670] We tested the in vivo efficacy of TIGIT deletion in combination with mouse PVRIG blockade in a syngeneic mouse B16/Db-hmgp100 subcutaneous melanoma tumor model. Treating tumor bearing C57BL/6 WT mice with an anti-mouse PVRIG blocking antibody had a minor effect on tumor growth inhibition (TGI) compared to the isotype treatment (17% TGI at day 11 and 8% TGI at endpoint, day 18). The effect of TIGIT deletion on tumor growth was minor compared to C57BL/6 WT control group (17% TGI at day 11 and 13% TGI at endpoint). However, when TIGIT deletion was combined with anti-mouse PVRIG antibody (Clone 407) treatment, significant TGI was evident (63% at day 11 and 49% TGI at endpoint) (FIGS. 80A and 80B). In accordance to TGI, TIGIT KO mice treated with the anti-mouse PVRIG antibody (Clone 407) exhibited increased survival compared to the C57BL/6 WT control group, however, statistical significance was not achieved (FIG. 80C).

### Summary and Conclusions

[0671] The combination of TIGIT deletion and PVRIG blockade significantly reduced tumor growth in vivo, indicating that both TIGIT and PVRIG play an inhibitory role in this melanoma tumor model. These data suggest that co-targeting TIGIT and PVRIG could be another combination therapy that significantly enhances anti-tumor responses.

### R. Example 18

### PVRIG Antagonism Enhances T Cell Effector Function and Reduces Tumor Growth

### Abstract

[0672] Despite recent advances, the majority of patients do not derive long term benefit from checkpoint inhibitors. PVRIG is a novel immune suppressive receptor of the DNAM/TIGIT family and we demonstrate here a role of PVRIG in regulating anti-tumor responses. PVRIG binds to PVRL2 and displays significantly enhanced expression on tumor infiltrating lymphocytes as compared to lymphocytes from normal tissues. PVRIG antagonism enhanced human T cell activation and combination of PVRIG with either PD-1 or TIGIT inhibitors further synergistically increased lymphocyte function. We next addressed the role of PVRIG in preclinical tumor models. PVRIG^{-/-} mice displayed significantly increased T cell activation in vitro and reduced MC38 tumor growth that was mediated by increased CD8 effector function. Antagonistic anti-PVRIG antibody significantly reduced tumor growth in combination with anti-PD-L1 or when tested in TIGIT^{-/-} mice. In summary, we demonstrate that PVRIG-PVRL2 pathway was induced in human cancers and that antagonizing PVRIG-PVRL2 interactions resulted in increased T cell function and reduced tumor growth.

### State of Significance

[0673] These data demonstrate that PVRIG is a promising target for the treatment of cancer and provide the rationale for testing a PVRIG inhibitor, CHA.7.518.1.H4(S241P), as a novel cancer immunotherapy agent either as monotherapy or in combination with either TIGIT or PD1 blockade.

### Introduction

[0674] Increasing evidence demonstrate that endogenous immune responses are critical in sculpting the initiation, progression, and suppression of cancer (1) (2). The immune status of patients as well as the content of tumor-infiltrating leukocytes (TILs) within the tumor microenvironment (TME) are key prognostic indicators of not only cancer survival rates, but also how patients respond to therapy (3) (4). T cells are a key component of TILs that can invoke an anti-tumor response, and most anti-tumor immune responses ultimately rely on the functionality of effector lymphocytes cells. An enrichment of CD8 T cells in the TME of a patient's tumor, as well as other factors that bias an immune response towards an effective CD8 T cell response such as mutational load and a Th1 polarized TME, are all key prognostic indicators for a favorable anti-tumor immune response (5) (6).

[0675] A key observation across many solid tumors is that effector T cells have an activated or ‘exhausted’ phenotype within the TME (7). This indicates that although T cells within the TME have initially seen cognate antigen, been activated, and trafficked to the tumor, they are subsequently not capable of invoking an effective anti-tumor response. Pre-activated or exhausted T cells are defined by increased surface expression of co-inhibitory receptors, such as PD-1 and CTLA-4 (8). Therapeutically targeting these co-inhibitory receptors with antibodies that inhibit interactions with their cognate ligands have shown remarkable clinical efficacy in patients with multiple advanced cancers (9). Mechanistically, it has been shown that targeting these co-inhibitory receptors leads to the expansion of already tumor-reactive T cells that pre-exist in the TME and to the production of T cell pools with widened T cell receptor diversity (10) (11) (12). Although checkpoint inhibitors currently in the clinic have revolutionized cancer treatment and demonstrated the power of the immune system in combating cancer, many patients still relapse and/or do not respond to treatment. Consequently, increased understanding of the immune response in cancer and targeting additional immune-based pathways will lead to additional therapeutic treatments.

[0676] Among these novel pathways, a group of receptors and ligands within the nectin and nectin-like family are currently under investigation as potential novel cancer immunotherapies. Receptors within this family include DNAM-1 (CD226), CD96 (TACTILE), TIGIT, and more recently, PVRIG (CD112R) (13) (14) (15). Of these molecules, DNAM is an activating receptor within this subfamily, binding to 2 ligands, PVR (CD155) and PVRL2 (CD112), to deliver an activating signal to lymphocytes (16). Two receptors in this family have been shown to inhibit human lymphocyte function, TIGIT, and more recently, PVRIG (17) (18). TIGIT is reported to have a high affinity interaction with PVR, a much weaker affinity to PVRL2, and has been shown to inhibit both T cell and NK cell responses by delivering an inhibitory signal into lymphocytes through its ITSM motif (19) (20). More recently, PVRIG was shown to bind with high affinity to PVRL2 and to deliver an inhibitory signal through its ITIM motif (15). In both cases, the affinity of TIGIT to PVR and of PVRIG to PVRL2 is higher than the affinity of DNAM to either PVR or PVRL2, suggesting TIGIT and PVRIG can outcompete PVR and PVRL2 from DNAM, providing an indirect mechanism by which TIGIT and PVRIG can reduce T cell function. Within this family, PVR is also a ligand for CD96. The function of CD96 has been reported to be inhibitory on mouse lymphocytes (21) but activating on human lymphocytes (22). Based on these data, we postulate on human lymphocytes that 2 receptors, TIGIT and PVRIG, bind with high affinity to PVR and PVRL2, respectively, to deliver inhibitory signals to dampen T cell function.

[0677] Although human PVRIG has been shown to inhibit T cells response in one recent report, the role of PVRIG and PVRL2 in cancer immune surveillance is not well understood. In particular, the expression profile of this pathway in cancers and the role of PVRIG in regulating CD8 T cell anti-tumor responses has not been reported. Furthermore, functional characterization of the mouse PVRIG gene and the effect of disrupting PVRIG-PVRL2 interaction in vivo in pre-clinical tumor models has not been reported. Herein, we elucidated the role of PVRIG in a cancer setting by reporting on PVRIG and PVRL2 expression profile in cancer and the effect of PVRIG antagonism in tumor cell co-culture assays and in preclinical tumor models. We demonstrate that PVRIG has a differentiated expression profile on T cell subsets compared to TIGIT or CD96 and that PVRIG and PVRL2 expression were induced in cancer compared to normal adjacent tissues. In multiple human in vitro assay systems, a high-affinity PVRIG antagonistic monoclonal antibody (CHA.7.518.1.H4(S241P)) enhanced T cell function, in particular when combined with anti-TIGIT or anti-PD1 antibody. In addition, we report the novel characterization of mouse PVRIG using antagonistic antibodies or PVRIG deficient mice and demonstrate that inhibition of PVRIG-PVRL2 interaction reduced tumor growth, with most potent effects in combination with PD-1 inhibition or TIGIT genetic deficiency. Collectively, this data shows that PVRIG is a critical inhibitory receptor in regulating T cell anti-tumor responses and support the development of CHA.7.518.1.H4(S241P), for clinical testing in cancer patients.

### Materials and Methods

### Human Peripheral Blood and Tumor Expression Studies

[0678] Healthy donor human PBMCs were obtained from Stanford University in accordance with the Declaration of Helsinki. Human tissues were provided by the Cooperative Human Tissue Network, a National Cancer Institute supported resource. Human cancer tissue and matched normal adjacent tissues were dissociated into single cells as per manufacturer's protocol (Miltenyi Biotec). Dissociated cells were analyzed by flow cytometry for expression of various targets on different cell subsets. For each target expression on an individual cell subset, a fold expression value was calculated by taking the MFI value of target divided by the MFI value of the isotype control. Other investigators may have received samples from these same tissue specimens. The tumor type was determined based on reviewing the pathology report for each sample. For IHC studies, anti-PVRL2 antibody (HPA-012759, Sigma) and PD-L1 (Sp142, SpringBio) were used to stain tumor micro-arrays (Biochain institute) using conditions as described in the supplemental methods. Scoring was performed by 2 independent reviewers on duplicate cores from the same tumor.

### PVRIG Antibody Generation and Characterization

[0679] Anti-human PVRIG and anti-mouse PVRIG antibodies were generated as detailed in the supplemental methods. Briefly, antibody binding specificity and affinity were assessed by selective binding to PVRIG engineered cells with no detectable binding to cells that do no express the gene. Antagonistic activity of these anti-PVRIG antibodies was determined using ELISA and FACS based assays in which the interaction of PVRIG with PVRL2 was disrupted. For characterization in cell based assays, antibodies were tested in several T cell-target cell co-culture assay systems consisting of target cells that express PVRL2 in culture with PBMC or tumor-derived T cells. gp100 specific T cells lines were expanded from melanoma tumors as previously described (23). CMVpp65 reactive T cells were expanded from healthy donor PBMCs (CTL immunospot) with CMVpp65 (495-503), IL-2, and IL-7 for10 days. For combination studies, antibodies to PD-1, TIGIT, and PVRIG were used at 10 μg/ml. Cytokine concentrations in conditioned media was determined using Cytometric Bead Array (CBA) and FACS staining was performed as described in the supplemental methods.

### Characterization of Mouse PVRIG Expression and Function

[0680] Binding interactions of mouse PVRIG with mPVRL2 and mPVR were assessed by SPR and ELISA using recombinant PVRIG, PVRL2, and PVR proteins and by FACS using ectopically engineered PVRIG and PVRL2 overexpressing cell lines or PVR or PVRL2 siRNA transfected cell lines. PVRIG and TIGIT deficient mice were generated as described in the supplemental methods. Expression analysis was performed to examine expression of PVRIG in spleen, lymph node, and tumor in various cell subsets. Cell functional assays demonstrating a T cell modulatory activity for mouse PVRIG were established using WT and PVRIG^{-/-} T cells and PVRL2 Fc or PVRL2 ectopically expressed target cells as detailed in the supplemental materials and methods. CT26, MC38, and B16/Db-hmgp100 tumor models were performed as described in the supplemental methods. All studies were approved by the Institutional Animal Care and Use committee at the Tel-Aviv University (Tel-aviv, Israel) or Johns Hopkins University (Baltimore, USA).

### Results

### PVRIG Expression is Highest on Effector T Cells of Peripheral Blood and Tumors

[0681] The Ig superfamily (IgSF) consists of hundreds of proteins but only a few of them are T cell inhibitory receptors. Proteins of the IgSF tend to evolve quickly (24) and therefore sequence similarity among these proteins is generally low and is not optimal for identifying novel immune receptors. To identify novel immune checkpoints, we developed bioinformatic algorithms based on shared genomic and proteomic characteristics among known immune checkpoints, such as gene structure, protein domains, predicted cellular localization and expression pattern. Using these algorithms, PVRIG was identified as a novel immune receptor. A report has recently also demonstrated that human PVRIG (CD112R) binds to PVRL2 and inhibits T cell function (15). However, the relevance of this pathway in regulating tumor immune surveillance has not been reported. Here, we have elucidated the expression and function of PVRIG and PVRL2 in human cancers and preclinical tumor models. In peripheral blood from healthy donors, PVRIG was expressed exclusively on lymphocytes, with highest expression on CD8 T cells and NK cells (FIG. 83A). Further subset analysis of T cells showed highest PVRIG expression on CD8 or CD4 memory/effector T cell subsets in comparison with Treg subset (FIG. 83B, FIG. 90A). The predominantly memory T-cell expression pattern differentiates PVRIG from other receptors in the family (TIGIT, CD96) which tend to have equal or higher expression on Tregs compared to memory/effector T cells. We further compared the expression kinetics of PVRIG and TIGIT post T cell activation in 2 assay systems (CMV recall response FIG. 83C, DC-MLR FIG. 83D, FIG. 90B) and show that PVRIG has delayed kinetics of induction and more sustained expression at the late timepoint as compared to TIGIT. The preferential expression of PVRIG on memory/effector cells as compared to TIGIT suggests a unique role for PVRIG in regulating T cell responses.

[0682] The delayed and sustained induction of PVRIG expression on T cells after activation suggested that it could be expressed in the tumor microenvironment. Next, we analyzed the expression of PVRIG on leukocytes from dissociated human tumors directly ex vivo by FACS. Expression of PVRIG was detected on CD8 T cells, CD4 T cells, and NK cells from multiple tumor types (FIG. 83E-G, FIG. 90C). PVRIG was co-expressed with PD-1 and TIGIT on CD4 and CD8 T cells (FIG. 83F). On average, higher expression was detected on CD4⁺ and CD8⁺ TILs from breast, endometrial, head and neck, lung, kidney, and ovarian tumors as compared to bladder, colorectal, and prostate. In tumor samples in which PVRIG expression was low/not present ex vivo, activation with anti-CD3 and anti-CD28 enhanced the expression of PVRIG, suggesting that TIL expression of PVRIG can be further induced upon re-activation (FIG. 90D). For colon, lung, kidney, endometrial, and ovarian tumors, we were able to obtain normal adjacent tissue from the same patient and perform a comparison of PVRIG expression on lymphocytes isolated from the tumor vs normal tissue. TILS showed a significant induction of PVRIG on CD4 and CD8 T cells as compared to cells isolated from matching normal adjacent tissues (NAT) (FIG. 90E). As with PBMCs, we further compared PVRIG, TIGIT, and PD1 expression on Tregs vs CD8 T cells from lung, endometrial, and kidney tumors. On TILS, TIGIT expression was higher on Tregs compared to CD8 T cells whereas for PVRIG and PD1, similar or higher expression was observed on CD8 T cells compared to Tregs (FIG. 83H). Next, we examined the co-regulation of PVRIG, TIGIT, and PD-1 on T cell populations by correlation analysis of either the magnitude of expression on TILS ex vivo or the magnitude of the fold change in expression between tumor and NAT. In both analyses, CD4 and CD8 T cells displayed a positive and significant correlation between PVRIG and PD1 or TIGIT on (FIG. 90F). Taken together, these data demonstrate that PVRIG is expressed on T cells and NK cells from multiple human cancers, placing PVRIG as a novel inhibitory receptor target that may be critical in regulating T cell function in the tumor.

### PVRL2 Expression is Enhanced in Tumors Tissue Compared to Normal Adjacent Tissue

[0683] As PD-L1 expression has been demonstrated to help predict responses to PD-1 inhibitors, we examined whether the expression of PVRL2 was concomitant with expression of its cognate receptor, PVRIG, in human cancer tissues. Using an anti-PVRL2 antibody that we validated for staining FFPE samples (FIG. 91A), we stained tumor microarrays (TMA) composed of lung, colon, skin, breast, ovarian/endometrial, and kidney cancer tissues and scored each core based on prevalence and intensity of PVRL2 expression. PVRL2 expression was not present or minimally expressed in the majority of normal tissue samples from these organs. In tumor tissues, PVRL2 expression on tumor cells was detected in ˜50-70% of lung, colon, breast, and ovarian/endometrial cancers (FIG. 84A, 84F). Expression in kidney cancer samples ranged from 20-40% whereas expression in melanoma was the lowest (˜10%) (FIG. 84A, 84F). PVRL2 expression was detected on tumor cells and immune cells at the invasive front (FIG. 84B). To determine the specific immune cell subsets expressing PVRL2, we performed flow cytometry on freshly dissociated tumors. Expression of PVRL2 was detected on CD45⁺ immune cells, particularly myeloid cells (e.g. CD14⁺ tumor associated macrophages (TAMs) and myeloid DCs) and on CD45⁻ non-immune cells from multiple tumor types (FIG. 84C, D). No expression of PVRL2 was detected on lymphocytes (data not shown). Comparison of PVRL2 expression on CD45⁻ cells and TAMs isolated from colon, lung, kidney, endometrial, and ovarian tumors showed a significant induction of PVRL2 on cells isolated from the tumor as compared to cells isolated from matching NAT of the same donor (FIG. 92). For samples where we obtained PVRIG and PVRL2 expression, we examined expression of PVRIG on lymphocytes compared with PVRL2 on myeloid and on CD45⁻ cells from multiple tumor types. Of the cancer types examined, endometrial, lung, and kidney cancers had the highest prevalence of PVRIG^{hi} lymphocytes and PVRL2^{hi} TAMs or CD45⁻ non-immune cells (FIG. 842E, FIG. 93). Integrating data the TMA and dissociated tumor studies, we demonstrate that breast, endometrial, lung, head and neck, kidney, and ovarian tumors may representative a responsive tumor type for PVRIG antagonism.

### Compared to PD-L1, PVRL2 Expression is Differentially Regulated and Present in PD-L1⁻ Tumors

[0684] As PVRIG and PD-1 can be co-expressed on tumor-infiltrating lymphocytes (TILs), we also examined the co-expression of PVRL2 and PD-L1 on the same tumor by staining serial sections of the same TMA. PVRL2 expression on tumor cells was clearly detected in PD-L1⁻ tumor samples (as defined by no membranous PD-L1 staining on tumor cells or immune cells) at similar frequency and average score compared to PD-L1⁺ samples. (FIG. 85A, FIG. 84F). On immune cells, 3 of 5 tumors in which PVRL2 expression was detected on immune cells also expressed PD-L1 (data not shown), but the small numbers of samples makes it difficult to conclude on immune cell co-expression of PD-L1 and PVRL2. The expression of PVRL2 on tumor cells in PD-L1 negative tumors suggested that PVRL2 expression was more prevalent than PD-L1 in some tumors types and that targeting this pathway may be particularly effective in PD-L1⁻ tumors. Whereas PD-L1 is induced primarily by IFN-γ as a mechanism of adaptive resistance (28), PVRL2 is modulated by genomic stress, DNA damage, and tumor suppressor genes (29,30). To further understand the distinct regulation of PD-L1 and PVR/PVRL2, we next assessed the regulation of PVR, PVRL2 and PD-L1 expression in tumor cell lines and in monocyte-derived DCs by exposure to various inflammatory stimuli (FIG. 85D). Treatment of DCs with pro-inflammatory signals generally lead to an increase in PVR, PVRL2, and PD-L1 expression, demonstrating that PVR, PVRL2, and PD-L1 expression are increased upon DC maturation. In contrast, treatment of epithelial cells with IFN-γ increased expression of PD-L1 but had no effect on the high baseline expression of PVRL2 (FIG. 85E), supporting differential regulation of PVRL2 expression in comparison with PD-L1 by IFN-γ. In summary, these findings indicate that PD-L1 and PVRL2 can be co-regulated on antigen presenting cells (APCs) such as DCs but can be differentially regulated on epithelial cells. The presence of PVRL2 in PD-L1-negative tumors suggests that targeting this pathway may be of potential benefit in patients that are non-responsive to or progress on PD-1 inhibitors.

CHA.7.518.1.H4(S241P) is a High Affinity Humanized Monoclonal Antibody to PVRIG that Disrupts the Interaction of PVRIG to PVRL2

[0685] To examine the functional consequences of antagonizing human PVRIG-PVRL2 interactions, we generated a high affinity, antagonistic anti-PVRIG antibody, CHA.7.518.1.H4(S241P), which blocks the interaction of PVRIG and PVRL2. This antibody selectively bound HEK293 cells ectopically expressing human PVRIG or cynomolgus macaque PVRIG and also bound Jurkat cells that endogenously express PVRIG with sub-nanomolar affinity (FIG. 86A). In biochemical assays, CHA.7.518.1.H4(S241P) blocked the interaction of PVRIG Fc with PVRL2⁺ HEK293 cells (FIG. 86B) and also blocked PVRL2 Fc binding to PVRIG⁺ HEK293 cells (FIG. 86C). Using this antibody, we observed a functional effect of an antagonistic anti-PVRIG in several T cell assays. Artificial antigen-presenting cells (aAPC) ectopically expressing a cell surface anti-CD3 antibody and human PVRL2 were generated and co-cultured with primary human CD4 T cells, either in the presence of anti-PVRIG (CHA.7.518.1.H4(S241P)) or isotype control. PVRIG expression was induced on proliferating CD4 T cells upon co-culture with the CHO anti-CD3 aAPC (FIG. 94A). Antagonism of PVRIG with CHA.7.518.1.H4(S241P) enhanced proliferation of CD4 T cells from multiple donors (FIG. 86D). We also tested the effect of anti-PVRIG on 2 human gp100 reactive CD8 T cell lines that were derived from melanoma tumors. These T cell lines were individually co-cultured with aAPCs expressing HLA-A2 and PVRL2 (FIG. 94B) in the presence of isotype control IgG or anti-PVRIG antibodies. As observed in both lines, anti-PVRIG increased IFN-γ and TNF-α production by ˜20-50%. In a dose response assessment, CHA.7.518.1.H4(S241P) displayed single digit nano-molar EC50 values in multiple assays (FIG. 94C, D). These data collectively demonstrate that antagonizing PVRIG-PVRL2 interactions with CHA.7.518.1.H4(S241P) resulted in increased T cell activation.

CHA.7.518.1.H4(S241P) in Combination with TIGIT or PD-1 Inhibitors Resulted in Synergistic Enhancement of T Cell Function.

[0686] Combination of PVRIG and TIGIT blockade synergistically increased CD4 T cell function in a T cell-dendritic cell co-culture assay (15), suggesting a role for this pathway in regulating T cell-APC interactions. The effects of PVRIG and TIGIT blockade on CD8 T cells in a tumor cell co-culture setting has not been reported. As our tumor expression profiling demonstrated expression of PVRL2 on CD45⁻ immune cells, we further explored the effect of targeting this pathway in T cell—tumor cell co-cultures using 2 T cell assay systems. We first performed a co-culture of 2 gp100 tumor antigen specific CD8 T cell lines with a melanoma cell line, MEL624, in the presence of anti-PVRIG, anti-TIGIT, or isotype control antibodies, either individually or in combination. MEL624 cells express both PVR and PVLR2 and both TIL-209 and TIL-463 expressed PVRIG, TIGIT, and PD-1 (FIG. 86F). On TIL-209, we observed that anti-PVRIG or anti-TIGIT alone did not increase IFN-γ and that the combination of anti-PVRIG and anti-TIGIT synergistically increased IFN-γ production (FIG. 86G). On TIL-463, we observed that anti-PVRIG or anti-TIGIT modestly increased IFN-γ production, and that combination of anti-PVRIG and anti-TIGIT additively increased IFN-γ (FIG. 86G). In an additional assay system, we utilized CMVpp65-reactive CD8 T cells as a model system to study human T cell responses. HLA-A2⁺ CMVpp65 CD8 T cells were expanded in the presence of CMVpp65 (495-503) and expression of PVRIG, TIGIT, and PD-1 was observed on day 10 (FIG. 86F). PVRIG was expressed on CMVpp65 specific CD8 T cells at similar magnitude to what was observed in human cancer samples (FIG. 83). As target cells, we identified a PD-L1^{hi} (Panc05.04) and a PD-L1^{lo} (Colo205) HLA-A2⁺ cancer cell line that both expressed similar amounts of PVR and PVRL2 (FIG. 86F). We next performed a co-culture of the CMVpp65 reactive T cells with HLA-A2⁺ tumor cell lines pulsed with pp65 (495-503) peptide in the presence of blocking antibodies to PVRIG, TIGIT, and/or PD-1. We observed that anti-PVRIG Ab increased IFN-γ by ˜50% in the co-culture with Panc05.04 cells and minimally in the co-culture with Colo205 (FIG. 861). Combination of anti-TIGIT with anti-PVRIG Ab synergistically increased IFN-γ production on both target cell lines, resulting in a greater increase in IFN-γ compared to PD-1 antibody alone (FIG. 86H). Combination of anti-PVRIG and anti-PD-1 also led to synergistic increases in IFN-γ production as compared to individual antibody (FIG. 86I). Taken together, these data suggest a potent synergy of combining PVRIG and TIGIT or PVRIG and PD1 blockade in increasing activation of human CD8 T cells upon interaction with tumor cells.

### PVRIG Deficiency Resulted in Increased T Cell Proliferation and Reduced Tumor Growth

[0687] Although the sequence for mouse PVRIG and its interaction with mouse PVRL2 has been reported, the expression profile and immune modulatory activity of mouse PVRIG is not well understood. We first analyzed mPVRIG RNA expression and transcript in NK, NKT and T cells (FIG. 87A). Activated mouse CD8 T cells had elevated PVRIG transcripts with delayed induction kinetics compared to TIGIT (FIG. 87B). We confirmed that that recombinant mPVRIG bound to mPVRL2 protein by surface plasmon resonance (SPR) and ELISA performed in several assay orientations (FIG. 95A-D). We also observed an interaction between mPVRIG and mPVR, although the affinity was approximately 10× less than the interaction with mPVRL2 (FIG. 95E). To determine whether PVR or PVRL2 is the dominant ligand for mPVRIG, we tested the binding of mouse PVRIG Fc to B16F10 cells which express PVR and PVRL2 (data not shown). PVRIG Fc showed a dose dependent binding to B16F10 cells that was completely abolished upon PVRL2 siRNA knockdown in B16F10 cells (FIG. 95F). In comparison, the binding of PVRIG Fc fusion protein was slightly, but consistently, reduced following PVR knockdown (FIG. 95F) suggesting that a very weak interaction occurs between mPVRIG and mPVR. Taken together, these results demonstrate that in mice, PVRL2 is the primary ligand for PVRIG, as is the case in human. To delineate the role of PVRIG in immune responses, we generated PVRIG deficient (^{-/-}) mice (FIG. 96). PVRIG^{-/-} mice were born at the expected Mendelian ratios, displayed no overt phenotype up to 10 months of age, and at 8 weeks of age had similar leukocyte cellularity (peripheral and lymphoid tissue) when compared to wild type mice (FIG. 97). Wild-type (WT) CD8 T cells and NK cells express PVRIG and no expression of PVRIG was detected on PVRIG^{-/-} cells (FIG. 87C). To examine the role of PVRIG in regulating mouse T cell responses, we examined the proliferation of WT and PVRIG^{-/-} T cells in 2 assay systems. WT or PVRIG^{-/-} T cells were activated with immobilized anti-CD3 in the presence of soluble PVRL2 Fc or control Fc protein. Soluble PVRL2 Fc significantly inhibited WT CD4⁺ T cell proliferation but not PVRIG^{-/-} CD4⁺ T cell proliferation (FIG. 87D), suggesting that PVRIG^{-/-} cells lack an inhibitory signal. To evaluate the role of mouse PVRIG in CD8⁺ T cell interaction with tumor cells, PVRIG^{-/-} mice were bred to pmel TCR transgenic mice, which express a transgenic TCR specific to gp100₂₅₋₃₃ (28). Activated PVRIG^{-/-} or WT Pmel CD8+ T cells were co-cultured with B16-Db/gp100 melanoma tumor cells that endogenously express PVRL2 (data not shown) and activation and effector function evaluated. PVRIG^{-/-} pmel CD8⁺ T cells showed enhanced degranulation and production of effector cytokines (IFN-γ and TNF-α) compared to WT cells (FIG. 87E). These data indicate that mouse PVRIG inhibits activation and effector function of tumor-specific T cells upon co-culture with PVRL2⁺ tumor target cells.

[0688] We next studied the effects of PVRIG deficiency on tumor growth in the MC38 syngeneic model. PVRIG^{-/-} mice displayed significantly reduced tumor growth compared to WT mice (p<0.05; FIG. 88A-B). Moreover, PD-L1 blockade, begun on day 14, further amplified anti-tumor responses and reduced tumor growth in PVRIG^{-/-} mice compared to anti-PD-L1-treated WT mice (p=0.052) (FIG. 88C-D). To assess the functional effects of PD-L1 blockade on PVRIG^{-/-} and WT tumor micro-environments, we harvested tumors and tumor-draining lymph nodes from each of the four experimental cohorts on day 18, when groups had received 2 doses of either isotype or anti-PD-L1 but no differences in tumor volume were observed, and performed flow cytometry for immune subset composition and intracellular cytokines. Immune cell (CD45⁺) trafficking into PVRIG^{-/-} tumors was enhanced moderately (88% relative to WT tumors) as were CD8⁺ T cells (92% compared to WT tumors) and IFN-γ-producing CD8⁺ T cells (110% increase over WT tumors; FIG. 88E). In combination with PD-L1 blockade, infiltration of CD45⁺ cells was increased significantly in PVRIG^{-/-} tumors (160% relative to tumors from anti-PD-L1-treated WT mice; p=0.032; FIG. 88F). Anti-PD-L1-treated PVRIG^{-/-} tumors also had greater numbers of total CD8⁺ T cells per tumor weight (252% increase) and IFN-γ-producing CD8⁺ T cells (297% increase), compared to treated anti-PD-L1 treated WT tumors (FIG. 88F). We also observed that PVRIG^{-/-} mice had unaltered effector tumor-infiltrating CD4⁺ T cell and Foxp3⁺ Treg numbers regardless of PD-L1 blockade (data not shown). The rescue of immune dysfunction in PVRIG^{-/-} tumors, particularly following PD-L1 blockade, was mirrored in the tumor-draining lymph nodes that had increased frequencies of IFN-γ⁺TNF-α⁺ effector CD8⁺ T cells relative to anti-PD-L1-treated WT mice (FIG. 88G-H). Taken together, these data demonstrate that PVRIG ablation, results in reduced tumor growth associated with an increased anti-tumor immune response, in particular when combined with anti-PD-L1 antibody treatment.

Anti-mPVRIG Antibody Inhibited Tumor Growth in Combination with PD-1 Antibody or TIGIT Deficiency

[0689] After demonstrating that genetic deficiency of PVRIG resulted in reduced tumor growth, we next aimed to demonstrate that antibody-mediated inhibition of PVRIG-PVRL2 interaction could improve anti-tumor immunity, in particular in combination with PD1 or TIGIT inhibitors as our human in vitro data has demonstrated. To assess this, we generated a high affinity, antagonistic anti-mPVRIG antibody. Affinity assessments of anti-mPVRIG mAb determined by FACS showed sub-nano-molar Kd (0.33 nM on HEK293 mPVRIG, 0.39 nM on D10.G4.1 cells), similar to CHA.7.518.1.H4(S241P) (FIG. 95G-H). The specificity of this antibody was further confirmed as the majority of binding to D10.G4.1 cells was abrogated upon mPVRIG knockdown (FIG. 95I). Anti-mPVRIG was tested for disrupting mPVRIG-mPVRL2 interaction by inhibiting the binding of mPVRIG Fc to B16F10 and the binding of mPVRL2 Fc to mPVRIG-overexpressing HEK293 cells (FIG. 89A). Complete blocking of PVRIG-PVRL2 interaction by anti-mPVRIG antibody was observed in both assay formats (FIG. 89A, FIG. 95J), demonstrating an antagonistic anti-mPVRIG antibody. Next, we tested the in vivo efficacy of mPVRIG blockade in a syngeneic CT26 subcutaneous colon tumor model. PVRIG expression was elevated on NK and T cells in the tumor microenvironment, compared to corresponding splenic or draining lymph node subsets (FIG. 89B). Treating tumor bearing mice with anti-mPVRIG blocking mAb as monotherapy failed to reduce tumor growth (data not shown). However, combination of anti-PVRIG and anti-PD-L1 mAbs effectively delayed CT26 tumor growth (FIG. 89C) and increased significantly the survival of treated mice with 40% rate of complete responders (FIG. 89D). Consistent with our human T cell assay data, these data demonstrate that combination of PD-1 and PVRIG inhibitors can reduce tumor growth.

[0690] We also tested the effect of ablating both PVRIG and TIGIT signaling in regulating anti-tumor responses. For these studies, we tested the efficacy of anti-mPVRIG antibody in either WT or TIGIT^{-/-} mice inoculated with B16F10/Db-hmgp100 melanoma cells. Treatment of tumor bearing WT mice with anti-mPVRIG blocking mAb had minor effect compared to isotype treatment (17% TGI at day 11 and 8% TGI at endpoint, day 18). The effect of TIGIT deletion on tumor growth was minor as well, compared to WT control group (17% TGI at day 11 and 13% TGI at endpoint). However, when TIGIT deletion was combined with anti-PVRIG mAb treatment, a significant tumor growth inhibition was observed (63% at day 11 and 49% TGI at endpoint (FIG. 89E, F). In accordance to tumor growth inhibition, TIGIT^{-/-} mice treated with anti-PVRIG mAb 407 exhibited increased survival compared to WT control group, however, statistical significance was not achieved in this aggressive rapidly growing tumor model (data not shown). Taken together, these data demonstrate synergistic activity of PVRIG inhibitors with PD1 or TIGIT inhibitors and are in accordance with our human functional data providing the rationale for clinical testing of CHA.7.518.1.H4(S241P) with PD1 or TIGIT inhibitors.

### Discussion

[0691] Although antibodies targeting immune T cell checkpoints such as CTLA4 and PD-1 have increased cancer patient survival, the majority of cancer patients still do not display clinical benefit. One possible reason for this is the presence of additional T cell regulators that inhibit T cell anti-tumor immunity. Here, we elucidated the role of PVRIG in regulating effector T cell function and demonstrate that PVRIG antagonism increases T cell anti-tumor responses and reduces tumor growth.

[0692] PVRIG is a novel member of the nectin and nectin like family, placing it among several known immunoregulatory receptors in the family. Understanding the interplay of the receptors within this family is crucial to understanding the relevance and mechanism of action of PVRIG. Of these receptors, DNAM, TIGIT, and CD96 are most closely related to PVRIG in terms of sharing the same ligands, PVR and PVRL2. DNAM binds to both PVR and PVRL2 and delivers a costimulatory signal to lymphocytes. TIGIT is reported to bind to PVR and weakly to PVRL2. We were unable to detect an interaction between TIGIT and PVRL2 using ELISA or SPR (data not shown), suggesting that PVR is the dominant ligand for TIGIT. Using similar methods, we and a recent report detected a high affinity interaction between PVRL2 and PVRIG, suggesting that PVRIG is the dominant inhibitory receptor to PVRL2. These data suggest that TIGIT and PVRIG comprise dual signaling nodes in this axis and that blocking both is needed for maximal increase of T cell activation within this family. In addition to interacting with different ligands, we observed that PVRIG has the highest expression on effector or memory T cells, similar to PD-1 whereas TIGIT has the highest expression on regulatory T cells. Furthermore, we observed that PVRIG displayed late induction after T cell activation as compared to TIGIT. These data suggest that PVRIG has a unique role within this family, interacting with high affinity to PVRL2 and having a differentiated expression on memory cells and a late induction profile to TIGIT.

[0693] Reported here is the novel role of PVRIG in regulating anti-tumor T cell responses using PVRIG deficient mice and antagonistic anti-PVRIG antibodies. It was demonstrated here that mouse PVRIG was expressed on T cells and NK cells, induced upon lymphocyte activation, and is highest in the TME as compared to the periphery. Furthermore, we show that PVRIG deficiency led to increased T cell function in-vitro and reduced tumor growth in-vivo. An antagonistic antibody to PVRIG reduced tumor growth when combined with anti-PD-L1 or genetic deficiency of TIGIT, demonstrating a necessary role of PVRIG in regulating T cell responses. These novel data provide in vivo proof of concept using preclinical tumor models that targeting PVRIG in combination with PD1 or TIGIT antagonism is a potential novel therapy for the treatment of cancers.

[0694] Reported here on a high affinity anti-human PVRIG antibody that disrupts the interaction of PVRIG and PVRL2 which we are pursuing for testing in clinical trials. To determine potential cancer indications that could inform on patient selection in clinical trials, we examined the expression profile of this axis in human cancers by FACS and IHC. For PVRIG, we observed that the mean expression of PVRIG on CD4 and CD8 T cells by FACS highest in endometrial, lung, kidney, and ovarian cancers, although this difference did not achieve statistical difference with other cancer types as determined by ANOVA with a Tukey's multiple comparison test with the current number of samples. As PVRIG is induced upon T cell activation and given that the majority of tumor infiltrating T cells are antigen experienced, it is perhaps not surprising that the median PVRIG expression was similar across tumor samples and cancer types. We observed that PVRIG expression was correlated with PD-1 and TIGIT expression, suggesting that the interplay of these 3 inhibitory receptors will be important in regulating the anti-tumor response. In this report, we observed a synergistic increase in T cell function when PVRIG antibodies were combined with TIGIT antibodies in a CD8 T cell tumor cell co-culture, better than PD-1 in combination with PVRIG or TIGIT inhibitors. These data, along with a previous study demonstrating a role for PVRIG and TIGIT in regulating DC-T cell interactions, show that this pathway could be involved in regulating T cell-APC and T cell-tumor cell interactions, and provide multiple mechanisms by which targeting PVRIG could increase the anti-tumor immune response.

[0695] As expression of PD-L1 has been correlated with clinical response to PD-1 inhibitors, we also analyzed PVRL2 expression in tumors by FACS and IHC to assess whether certain cancer types have higher expression. Assessing dissociated tumor cells, we observed that mean PVRL2 expression on macrophages from endometrial, head & neck, kidney, lung, and ovarian samples were higher when compared to other tumor types. Mean PVRL2 expression on CD45⁻ non immune cells was higher on breast, colorectal, endometrial, lung, ovarian, and prostate cancers compared to other cancers. Based on the PVRIG and PVRL2 expression, we determined that endometrial, head & neck, lung, kidney, and ovarian cancers have a greater incidence of tumors with high PVRIG and PVRL2 expression and that these are potential cancers that could response to inhibitors of this pathway.

[0696] It was observed here that PVRL2 expression can be modulated on antigen producing cells in vitro by inflammatory mediators whereas PVRL2 expression on cancer cells was not altered. These data suggest that PVRL2 expression on antigen presenting cells can be regulated by inflammation and could be an indicator of an inflamed tumor. Indeed, we did observe that all PD-L1+ tumors also express PVRL2, both on the tumor cells and in the immune compartment. Expression of PVRL2 on myeloid cells could help predict responses to PVRIG inhibitors in a combination setting with PD-1 or TIGIT to further enhance the anti-tumor effect. Interestingly, a portion of PD-L1 negative tumors also expressed PVRL2, primarily on the tumor cells and not on the immune cells. PVR and PVRL2 expression on epithelial cells is reported to be induced in tumorigenesis, as well as in response to stress and DNA damage. These data are consistent with in vitro findings that the regulation of PVRL2 expression on tumor cells is not dependent on IFN-g. As PD-L1 is induced in an adaptive resistance setting in response to IFN-g and is associated with an inflammatory response, the expression of PVRL2 in the absence of PD-L1 suggests that PVRL2 expression is more prevalent than PD-L1 and that PVRL2 is expressed in non-inflamed tumors. Based on the above, it is possible that the presence of PVR and PVRL2 contribute to suppressing immune responses independently of PD-L1 and that inhibitors of PVRIG and TIGIT could be of particular importance in patients that are PD-L1 negative or non-responders/progressors to PD-1 inhibitors.

[0697] In summary, this report provides several novel insights into PVRIG biology, including characterizing the expression of this axis in human cancers, demonstrating a prominent role for PVRIG/TIGIT in regulating the CD8-tumor cell interaction, and showing that PVRIG antagonism in combination with PD-1 inhibition or TIGIT deficiency lead to a synergistic reduction in tumor growth. These data extend our current understanding of PVRIG biology and provide rationale for clinical testing of CHA.7.518.1.H4(S241P), a high affinity anti-PVRIG antibody, in patients with cancer.

### REFERENCES

[0698] 1. Hanahan D, Weinberg R A. The hallmarks of cancer. Cell 2000; 100(1):57-70.
[0699] 2. Hanahan D, Weinberg R A. Hallmarks of cancer: the next generation. Cell 2011; 144(5):646-74 doi 10.1016/j.cell.2011.02.013.
[0700] 3. Galon J, Mlecnik B, Bindea G, Angell H K, Berger A, Lagorce C, et al. Towards the introduction of the ‘Immunoscore’ in the classification of malignant tumours. J Pathol 2014; 232(2):199-209 doi 10.1002/path.4287.
[0701] 4. Zitvogel L, Galluzzi L, Smyth M J, Kroemer G. Mechanism of action of conventional and targeted anticancer therapies: reinstating immunosurveillance. Immunity 2013; 39(1):74-88 doi 10.1016/j.immuni.2013.06.014.
[0702] 5. Danilova L, Wang H, Sunshine J, Kaunitz G J, Cottrell T R, Xu H, et al. Association of PD-1/PD-L axis expression with cytolytic activity, mutational load, and prognosis in melanoma and other solid tumors. Proc Natl Acad Sci USA 2016; 113(48):E7769-E77 doi 10.1073/pnas.1607836113.
[0703] 6. Topalian S L, Taube J M, Anders R A, Pardoll D M. Mechanism-driven biomarkers to guide immune checkpoint blockade in cancer therapy. Nat Rev Cancer 2016; 16(5):275-87 doi 10.1038/nrc.2016.36.
[0704] 7. Zarour H M. Reversing T-cell Dysfunction and Exhaustion in Cancer. Clin Cancer Res 2016; 22(8):1856-64 doi 10.1158/1078-0432.CCR-15-1849.
[0705] 8. Pardoll D M. The blockade of immune checkpoints in cancer immunotherapy. Nat Rev Cancer 2012; 12(4):252-64 doi 10.1038/nrc3239.
[0706] 9. Sharma P, Allison J P. Immune checkpoint targeting in cancer therapy: toward combination strategies with curative potential. Cell 2015; 161(2):205-14 doi 10.1016/j.cell.2015.03.030.
[0707] 10. Cha E, Klinger M, Hou Y, Cummings C, Ribas A, Faham M, et al. Improved survival with T cell donotype stability after anti-CTLA-4 treatment in cancer patients. Sci Transl Med 2014; 6(238):238ra70 doi 10.1126/scitranslmed.3008211.
[0708] 11. Robert L, Tsoi J, Wang X, Emerson R, Homet B, Chodon T, et al. CTLA4 blockade broadens the peripheral T-cell receptor repertoire. Clin Cancer Res 2014; 20(9):2424-32 doi 10.1158/1078-0432.CCR-13-2648.
[0709] 12. Tumeh P C, Harview C L, Yearley J H, Shintaku I P, Taylor E J, Robert L, et al. PD-1 blockade induces responses by inhibiting adaptive immune resistance. Nature 2014; 515(7528):568-71 doi 10.1038/nature13954.
[0710] 13. Chan C J, Andrews D M, Smyth M J. Receptors that interact with nectin and nectin-like proteins in the immunosurveillance and immunotherapy of cancer. Curr Opin Immunol 2012; 24(2):246-51 doi 10.1016/j.coi.2012.01.009.
[0711] 14. Martinet L, Smyth M J. Balancing natural killer cell activation through paired receptors. Nat Rev Immunol 2015; 15(4):243-54 doi 10.1038/nri3799.
[0712] 15. Zhu Y, Paniccia A, Schulick A C, Chen W, Koenig M R, Byers J T, et al. Identification of CD112R as a novel checkpoint for human T cells. J Exp Med 2016; 213(2):167-76 doi 10.1084/jem.20150785.
[0713] 16. Bottino C, Castriconi R, Pende D, Rivera P, Nanni M, Carnemolla B, et al. Identification of PVR (CD155) and Nectin-2 (CD112) as cell surface ligands for the human DNAM-1 (CD226) activating molecule. J Exp Med 2003; 198(4):557-67 doi 10.1084/jem.20030788.
[0714] 17. Yu X, Harden K, Gonzalez L C, Francesco M, Chiang E, Irving B, et al. The surface protein TIGIT suppresses T cell activation by promoting the generation of mature immunoregulatory dendritic cells. Nat Immunol 2009; 10(448-57 doi 10.1038/ni.1674.
[0715] 18. Stanietsky N, Simic H, Arapovic J, Toporik A, Levy O, Novik A, et al. The interaction of TIGIT with PVR and PVRL2 inhibits human NK cell cytotoxicity. Proc Natl Acad Sci USA 2009; 106(42):17858-63 doi 10.1073/pnas.0903474106.
[0716] 19. Johnston R J, Comps-Agrar L, Hackney J, Yu X, Huseni M, Yang Y, et al. The immunoreceptor TIGIT regulates antitumor and antiviral CD8(+) T cell effector function. Cancer Cell 2014; 26(6):923-37 doi 10.1016/j.ccell.2014.10.018.
[0717] 20. Zhang B, Zhao W, Li H, Chen Y, Tian H, Li L, et al. Immunoreceptor TIGIT inhibits the cytotoxicity of human cytokine-induced killer cells by interacting with CD155. Cancer Immunol Immunother 2016; 65(3):305-14 doi 10.1007/s00262-016-1799-4.
[0718] 21. Chan C J, Martinet L, Gilfillan S, Souza-Fonseca-Guimaraes F, Chow M T, Town L, et al. The receptors CD96 and CD226 oppose each other in the regulation of natural killer cell functions. Nat Immunol 2014; 15(5):431-8 doi 10.1038/ni.2850.
[0719] 22. Fuchs A, Cella M, Giurisato E, Shaw A S, Colonna M. Cutting edge: CD96 (tactile) promotes NK cell-target cell adhesion by interacting with the poliovirus receptor (CD155). J Immunol 2004; 172(7):3994-8.
[0720] 23. Machlenkin A, Uzana R, Frankenburg S, Eisenberg G, Eisenbach L, Pitcovski J, et al. Capture of tumor cell membranes by trogocytosis facilitates detection and isolation of tumor-specific functional CTLs. Cancer Res 2008; 68(6):2006-13 doi 10.1158/0008-5472.CAN-07-3119.
[0721] 24. Ohtani H, Nakajima T, Akari H, Ishida T, Kimura A. Molecular evolution of immunoglobulin superfamily genes in primates. Immunogenetics 2011; 63(7):417-28 doi 10.1007/s00251-011-0519-7.
[0722] 25. Taube J M, Anders R A, Young G D, Xu H, Sharma R, McMiller T L, et al. Colocalization of inflammatory response with B7-h1 expression in human melanocytic lesions supports an adaptive resistance mechanism of immune escape. Sci Transl Med 2012; 4(127):127ra37 doi 10.1126/scitranslmed.3003689.
[0723] 26. Cerboni C, Fionda C, Soriani A, Zingoni A, Doria M, Cippitelli M, et al. The DNA Damage Response: A Common Pathway in the Regulation of NKG2D and DNAM-1 Ligand Expression in Normal, Infected, and Cancer Cells. Front Immunol 2014; 4:508 doi 10.3389/fimmu.2013.00508.
[0724] 27. de Andrade L F, Smyth M J, Martinet L. DNAM-1 control of natural killer cells functions through nectin and nectin-like proteins. Immunol Cell Biol 2014; 92(3):237-44 doi 10.1038/icb.2013.95.
[0725] 28. Overwijk W W, Tsung A, Irvine K R, Parkhurst M R, Goletz T J, Tsung K, et al. gp100/pmel 17 is a murine tumor rejection antigen: induction of “self”-reactive, tumoricidal T cells using high-affinity, altered peptide ligand. J Exp Med 1998; 188(2):277-86.

### S. Example 19

### Tumor Cell Killing Assay

[0726] The effect of an anti-human TIGIT antibody and CHA.7.518.1.H4(S241P), either alone or in combination, on tumor cell killing was assessed by an in vitro co-culture assay with human CMV-specific CD8⁺ T cells. The HLA-A2⁺ target cell lines used in the assay were the melanoma cell line, Mel624, which stably expresses human PVR and PVRL2, and the pancreatic adenocarcinoma cell line, Panc05.04, which expresses endogenous levels of human PVR and PVRL2. Both tumor cell lines were stably transduced with a luciferase reporter gene through lentiviral transduction (System Biosciences). Mel624 and Panc05.04 cells were pulsed with the CMV pp65 peptide at 0.0033 μg/ml or 0.01 μg/ml at 37° C. for 1 hour, respectively. Cells were then washed and plated at 20,000 cells/well. A benchmark anti-human TIGIT antibody and CHA.7.518.1.H4(S241P) were added to the culture in combination, or with a control hIgG4 isotype antibody at 10 μg/ml. Human CMV-specific CD8⁺ T cells from three different donors, specified as Donor 4, Donor 72, and Donor 234 were added at 100,000 cells/well. Co-cultures were incubated at 37° C. for 16 hours. After the incubation, plates were removed from the incubator and allowed to equilibrate to room temperature for 30 minutes. Bio-Glo luciferase substrate (Promega) was added to each well and the mixture equilibrated for 10 minutes at room temperature protected from light. Luminesce or relative light units (RLU) was quantified on an EnVision multi-label reader (Perkin Elmer) with an ultra-sensitive luminescence detector. Percent specific killing was calculated by [(RLU for treatment antibody−RLU for medium alone)/RLU for medium alone]×100.

### Results

[0727] FIGS. 99A and B show the effect of the anti-TIGIT antibody and CHA.7.518.1.H4(S241P) treatment on killing of the Mel624 and Panc05.04 cells, respectively. When added to the co-culture alone, both the anti-TIGIT antibody and CHA.7.518.1.H4(S241P) induced significant T cell killing of the tumor cell lines compared to the isotype control antibody. For the anti-TIGIT antibody the percent specific killing ranged from 19-41% for the Mel624 cells, and 3-44% for the Panc05.04 cells across the 3 different CMV-reactive donors tested. For CHA.7.518.1.H4(S241P), the percent specific killing ranged from 16-20% for the Mel624 cells, and 0.21-29% for the Panc05.04 cells. In some cases, an additive effect on tumor cell killing was observed in the combined treatment of the anti-TIGIT antibody and CHA.7.518.1.H4(S241P).

[0728] To determine whether the effect of an anti-TIGIT antibody and CHA.7.518.1.H4(S241P) on tumor cell killing was dose-dependent, the assay was carried out with a 10 point, 2-fold dilution series for each antibody starting at 0.5 μg/ml for the anti-TIGIT antibodies, and 10 μg/ml for CHA.7.518.1.H4(S241P) (FIG. 100). Mel624 killing decreased in a dose-dependent manner when either anti-TIGIT antibody, BM26 or CPA.9.086, were combined with CHA.7.518.1.H4(S241P). More potent killing was observed for the CPA.9.086 and CHA.7.518.1.H4(S241P) combination with an EC₅₀ of 0.40±0.49 nM, compared to the BM26 and CHA.7.518.1.H4(S241P) combination with an EC₅₀ of 2.6±1.7 nM.

### T. Example 20

### Biophysical Measurement of K_{D}

[0729] KinExA equilibrium experiments were performed using a KinExA 3200 instrument (Sapidyne Instruments, Boise, Id., USA) at 22° C. Recombinant His-tagged human TIGIT was obtained from Sino Biologicals (Beijing, China) and reconstituted into 1× PBS. All antigen and antibody samples for KinExA analyses were prepared in degassed PBST buffer (PBS with 0.05% tween 20) with 100 μg/mL filtered BSA and 0.02% sodium azide. The secondary detection antibody used was Alexa Flour 647-labeled goat anti-human IgG (H+L) (Jackson ImmunoResearch Laboratories) diluted 400- to 700-fold in the PBST buffer (with BSA and azide) described above from a 0.5 mg/mL stock in 1× PBS, pH 7.4. For each KinExA experiment, ˜20 μg of human TIGIT was diluted into 1 mL of 50 mM sodium carbonate, pH 9.2 which was added directly to 50 mg of azlactone beads (Ultralink Support, Thermo Scientific, Rockford, Ill., USA) and rocked overnight at 4° C. After rocking, the beads were rinsed once with 1 M Tris buffer, pH 8.5, containing 10 mg/mL BSA and rocked for one hour at room temperature in the same buffer. Coupled beads were added to the bead reservoir in the KinExA instrument and diluted to ˜30 mL with 1× HBS-N (0.01 M Hepes, 0.15M NaCl, GE Healthcare) containing 0.02% sodium azide which was also the running buffer for the KinExA instrument. All antigen-coupled beads were used immediately after preparation.

[0730] For two replicate measurements of K_{D} for CPA.9.086 (Table 1), 14 concentrations of TIGIT ranging from 957 aM-212 pM were equilibrated at room temperature for ˜72 hours with 2.5 pM CPA.9.086 binding sites and 1.8 pM CPA.9.086 binding sites. For CPA.9.083, 14 concentrations of TIGIT ranging from 478 aM-196 pM were equilibrated for ˜72 hours with 1.8 pM CPA.9.083 binding sites. For duplicate measurements of the benchmark antibody, BM26 hIgG4, 14 concentrations of TIGIT ranging from 9.6 fM-3.53 nM were equilibrated for ˜72 hours with 20 pM BM26 binding sites and 8.0 pM BM26 binding sites. For CHA.9.547.13, 14 concentrations of TIGIT ranging from 10.5 fM-2.2 nM were equilibrated for ˜72 hours with 8 pM mAb CHA.9.547.13 binding sites. The volume flowed through the bead pack for each equilibrated sample for all experiments ranged from 4 mL to 11 mL at a flow rate of 0.25 mL/min. Data were fit with a 1:1 “standard equilibrium” binding model using KinExA Pro software (Version 4.2.10; Sapidyne Instruments) to estimate K_{D} and generate the 95% confidence interval (CI) of the curve fit.

### Results

[0731] Both CPA.9.083 and CPA.9.086 bound to human TIGIT with femtomolar binding affinity, while CHA.9.547.13 and BM26 bound with picmolar affinity. Thus, CPA.9.083 and CPA.9.086 bound to human TIGIT with the highest affinity of the four different antibodies tested.

TABLE 1
K_{D} measurements of anti-human TIGIT hIgG4 antibodies determined
by KinExA

| Antibody | K_{D} ± 95% CI (n = 1) | K_{D} ± 95% CI (n = 2) |
|---|---|---|
| CHA.9.547.13 | 18.8 ± 5.8 pM | Not determined |
| CPA.9.083 | 694 ± 277 fM | Not determined |
| CPA.9.086 | 553 ± 230 fM | 665 ± 378 fM |
| BM26 | 8.2 ± 2.8 pM | 11.2 ± 3.6 pM |

### U. Example 21

### Development and Functional Characterization of CPA.9.086, a Novel Therapeutic Antibody Targeting the Immune Checkpoint TIGIT

[0732] Background: TIGIT is a coinhibitory receptor that is highly expressed on lymphocytes, including effector and regulatory CD4+ T cells (Tregs), effector CD8+ T cells, and NK cells, that infiltrate different types of tumors. Engagement of TIGIT with its reported ligands, poliovirus receptor (PVR) and PVR-like proteins (PVRL2 and PVRL3) directly suppresses lymphocyte activation. PVR is also broadly expressed in tumors, suggesting that the TIGIT-PVR signaling axis may be a dominant immune escape mechanism for cancer. We report here the biophysical and functional characterization of CPA.9.086, a therapeutic antibody targeting TIGIT. We also demonstrate that co-blockade of TIGIT and a new checkpoint inhibitor, PVRIG, augments T cell responses.

[0733] Materials and Methods: Human phage display and mouse hybridoma antibody discovery campaigns were conducted to generate therapeutic anti-TIGIT antibodies. The resulting antibodies were evaluated for their ability to bind to recombinant and cell surface-expressed human TIGIT with high affinity. Cross-reactivity of the antibodies to cynomolgus macaque and mouse TIGIT was also examined. A subset of antibodies that bound with high affinity to human TIGIT, and cross-reactive to cynomolgus TIGIT were further characterized for their ability to block the interaction between TIGIT and PVR. Blocking antibodies were screened for their ability to enhance antigen-specific T cell activation in vitro either alone, or in combination with an anti-PVRIG antibody, CHA.7.518.1.H4(S241P).

[0734] Results: A lead antibody, CPA.9.086, was identified that binds to human TIGIT with high femtomolar affinity. This antibody bound to TIGIT endogenously expressed on human CD8+ T cells with higher affinity than tested benchmark antibodies, and was also cross-reactive to both cynomolgus and mouse TIGIT. When tested for in vitro activity, CPA.9.086 augmented cytokine secretion and tumor cell killing by CMV-specific CD8+ T cells with superior or equivalent potency to the tested benchmark antibodies. Combination of CPA.9.086 with an anti-PD1 antibody or CHA.7.518.1.H4(S241P) resulted in enhanced CMV-specific CD8+ T cell activity. Furthermore, we demonstrated that TIGIT is predominantly expressed on Tregs and effector CD8+ T cells from solid tumors compared to peripheral blood, suggesting that these populations will likely be preferentially targeted by CPA.9.086.

[0735] Conclusion: The development of a very high affinity antagonistic TIGIT antibody, CPA.9.086, that is currently in preclinical development is described. We postulate that the femtomolar affinity of CPA.9.086 could result in lower and less frequent dosing in patients. CPA.9.086 can enhance human T cell activation either alone or in combination with other checkpoint antibodies. Thus, this data demonstrates the utility of targeting TIGIT, PD1, and PVRIG for the treatment of cancer.

The application's sequence listing, which the Patent Office published only in electronic form, follows.

SEQUENCE LISTING (611 sequences)

SEQ ID NO: 1 - protein, 204 aa, Artificial Sequence
  Human PVRIG sequence starting from position 21
MGHRTLVLPWVLLTLCVTAGTPEVWVQVRMEATELSSFTIRCGFLGSGSISLVTVSWGGPNGAGGTTLAVLHPERGIRQWAPARQARWETQSSISLILEGSGASSPCANTTFCCKFASFPEGSWEACGSLPPSSDPGLSAPPTPAPILRADLAGILGVSGVLLFGCVYLLHLLRRHKHRPAPRLQPSRTSPQAPRARAWAPSQA

SEQ ID NO: 2 - protein, 224 aa, Artificial Sequence
  Human PVRIG sequence starting from position 1
MRTEAQVPALQPPEPGLEGAMGHRTLVLPWVLLTLCVTAGTPEVWVQVRMEATELSSFTIRCGFLGSGSISLVTVSWGGPNGAGGTTLAVLHPERGIRQWAPARQARWETQSSISLILEGSGASSPCANTTFCCKFASFPEGSWEACGSLPPSSDPGLSAPPTPAPILRADLAGILGVSGVLLFGCVYLLHLLRRHKHRPAPRLQPSRTSPQAPRARAWAPSQA

SEQ ID NO: 3 - protein, 479 aa, Artificial Sequence
  Human PVLR2 alpha isoform
MARAAALLPSRSPPTPLLWPLLLLLLLETGAQDVRVQVLPEVRGQLGGTVELPCHLLPPVPGLYISLVTWQRPDAPANHQNVAAFHPKMGPSFPSPKPGSERLSFVSAKQSTGQDTEAELQDATLALHGLTVEDEGNYTCEFATFPKGSVRGMTWLRVIAKPKNQAEAQKVTFSQDPTTVALCISKEGRPPARISWLSSLDWEAKETQVSGTLAGTVTVTSRFTLVPSGRADGVTVTCKVEHESFEEPALIPVTLSVRYPPEVSISGYDDNWYLGRTDATLSCDVRSNPEPTGYDWSTTSGTFPTSAVAQGSQLVIHAVDSLFNTTFVCTVTNAVGMGRAEQVIFVRETPRASPRDVGPLVWGAVGGTLLVLLLLAGGSLAFILLRVRRRRKSPGGAGGGASGDGGFYDPKAQVLGNGDPVFWTPVVPGPMEPDGKDEEEEEEEEKAEKGLMLPPPPALEDDMESQLDGSLISRRAVYV

SEQ ID NO: 4 - protein, 518 aa, Artificial Sequence
  Human PVLR2 delta isoform
MARAAALLPSRSPPTPLLWPLLLLLLLETGAQDVRVQVLPEVRGQLGGTVELPCHLLPPVPGLYISLVTWQRPDAPANHQNVAAFHPKMGPSFPSPKPGSERLSFVSAKQSTGQDTEAELQDATLALHGLTVEDEGNYTCEFATFPKGSVRGMTWLRVIAKPKNQAEAQKVTFSQDPTTVALCISKEGRPPARISWLSSLDWEAKETQVSGTLAGTVTVTSRFTLVPSGRADGVTVTCKVEHESFEEPALIPVTLSVRYPPEVSISGYDDNWYLGRTDATLSCDVRSNPEPTGYDWSTTSGTFPTSAVAQGSQLVIHAVDSLFNTTFVCTVTNAVGMGRAEQVIFVRETPNTAGAGATGGIIGGIIAAIIATAVAATGILICRQQRKEQTLQGAEEDEDLEGPPSYKPPTPKAKLEAQEMPSQLFTLGASEHSPLKTPYFDAGASCTEQEMPRYHELPTLEERSGPLHPGATSLGSPIPVPPGPPAVEDVSLDLEDEEGEEEEEYLDKINPIYDALSY

SEQ ID NO: 5 - protein, 120 aa, Artificial Sequence
  Variable heavy (vh) domain
QVQLVQSGAEVKKPGASVKVSCKASGYTFTDYNINWVRQAPGQGLEWMGYIYPYIGGSGYAQKFQGRVTMTRDTSTSTVYMELSSLRSEDTAVYYCAREDKTARNAMDYWGQGTLVTVSS

SEQ ID NO: 6 - protein, 8 aa, Artificial Sequence
  vhCDR1
GYTFTDYN

SEQ ID NO: 7 - protein, 8 aa, Artificial Sequence
  vhCDR2
IYPYIGGS

SEQ ID NO: 8 - protein, 13 aa, Artificial Sequence
  vhCDR3
AREDKTARNAMDY

SEQ ID NO: 9 - protein, 447 aa, Artificial Sequence
  Full length HC
QVQLVQSGAEVKKPGASVKVSCKASGYTFTDYNINWVRQAPGQGLEWMGYIYPYIGGSGYAQKFQGRVTMTRDTSTSTVYMELSSLRSEDTAVYYCAREDKTARNAMDYWGQGTLVTVSSASTKGPSVFPLAPCSRSTSESTAALGCLVKDYFPEPVTVSWNSGALTSGVHTFPAVLQSSGLYSLSSVVTVPSSSLGTKTYTCNVDHKPSNTKVDKRVESKYGPPCPPCPAPEFLGGPSVFLFPPKPKDTLMISRTPEVTCVVVDVSQEDPEVQFNWYVDGVEVHNAKTKPREEQFNSTYRVVSVLTVLHQDWLNGKEYKCKVSNKGLPSSIEKTISKAKGQPREPQVYTLPPSQEEMTKNQVSLTCLVKGFYPSDIAVEWESNGQPENNYKTTPPVLDSDGSFFLYSRLTVDKSRWQEGNVFSCSVMHEALHNHYTQKSLSLSPGK

SEQ ID NO: 10 - protein, 107 aa, Artificial Sequence
  Variable light (vl) domain
DIQMTQSPSSLSASVGDRVTITCRVSENIYSNLAWYQQKPGKAPKLLIYEATNLAEGVPSRFSGSGSGTDFTLTISSLQPEDFATYYCQHFWGTPYTFGQGTKLEIK

SEQ ID NO: 11 - protein, 6 aa, Artificial Sequence
  vlCDR1
ENIYSN

SEQ ID NO: 12 - protein, 3 aa, Artificial Sequence
  vlCDR2
EAT

SEQ ID NO: 13 - protein, 9 aa, Artificial Sequence
  vlCDR3
QHFWGTPYT

SEQ ID NO: 14 - protein, 214 aa, Artificial Sequence
  Full length light chain
DIQMTQSPSSLSASVGDRVTITCRVSENIYSNLAWYQQKPGKAPKLLIYEATNLAEGVPSRFSGSGSGTDFTLTISSLQPEDFATYYCQHFWGTPYTFGQGTKLEIKRTVAAPSVFIFPPSDEQLKSGTASVVCLLNNFYPREAKVQWKVDNALQSGNSQESVTEQDSKDSTYSLSSTLTLSKADYEKHKVYACEVTHQGLSSPVTKSFNRGEC

SEQ ID NO: 15 - protein, 119 aa, Artificial Sequence
  Variable heavy (vh) domain
QVQLVQSGAEVKKPGASVKVSCKASGYAFTNYLIEWVRQAPGQGLEWIGVINPGSGGIYYAQKFQGRVTMTADTSTSTVYMELSSLRSEDTAVYYCARSETHDTWFAYWGQGTLVTVSS

SEQ ID NO: 16 - protein, 8 aa, Artificial Sequence
  vhCDR1
GYAFTNYL

SEQ ID NO: 17 - protein, 8 aa, Artificial Sequence
  vhCDR2
INPGSGGI

SEQ ID NO: 18 - protein, 12 aa, Artificial Sequence
  vhCDR3
ARSETHDTWFAY

SEQ ID NO: 19 - protein, 446 aa, Artificial Sequence
  Full length HC
QVQLVQSGAEVKKPGASVKVSCKASGYAFTNYLIEWVRQAPGQGLEWIGVINPGSGGIYYAQKFQGRVTMTADTSTSTVYMELSSLRSEDTAVYYCARSETHDTWFAYWGQGTLVTVSSASTKGPSVFPLAPCSRSTSESTAALGCLVKDYFPEPVTVSWNSGALTSGVHTFPAVLQSSGLYSLSSVVTVPSSSLGTKTYTCNVDHKPSNTKVDKRVESKYGPPCPPCPAPEFLGGPSVFLFPPKPKDTLMISRTPEVTCVVVDVSQEDPEVQFNWYVDGVEVHNAKTKPREEQFNSTYRVVSVLTVLHQDWLNGKEYKCKVSNKGLPSSIEKTISKAKGQPREPQVYTLPPSQEEMTKNQVSLTCLVKGFYPSDIAVEWESNGQPENNYKTTPPVLDSDGSFFLYSRLTVDKSRWQEGNVFSCSVMHEALHNHYTQKSLSLSPGK

SEQ ID NO: 20 - protein, 107 aa, Artificial Sequence
  Variable light (vl) domain
DIQMTQSPSSLSASVGDRVTITCKASQSVRIAVAWFQQKPGKAPKALIYLASTRHTGVPSRFSGSGSGTDFTLTISSVQPEDFATYYCLQHWNYPYTFGQGTKLEIK

SEQ ID NO: 21 - protein, 6 aa, Artificial Sequence
  vlCDR1
QSVRIA

SEQ ID NO: 22 - protein, 3 aa, Artificial Sequence
  vlCDR2
LAS

SEQ ID NO: 23 - protein, 9 aa, Artificial Sequence
  vlCDR3
LQHWNYPYT

SEQ ID NO: 24 - protein, 214 aa, Artificial Sequence
  Full length light chain
DIQMTQSPSSLSASVGDRVTITCKASQSVRIAVAWFQQKPGKAPKALIYLASTRHTGVPSRFSGSGSGTDFTLTISSVQPEDFATYYCLQHWNYPYTFGQGTKLEIKRTVAAPSVFIFPPSDEQLKSGTASVVCLLNNFYPREAKVQWKVDNALQSGNSQESVTEQDSKDSTYSLSSTLTLSKADYEKHKVYACEVTHQGLSSPVTKSFNRGEC

SEQ ID NO: 25 - protein, 96 aa, Artificial Sequence
  Humanized sequences of CHA.7.518 antibody VH
QVQLVQSGAEVKKPGASVKVSCKASGYTFTSYYMHWVRQAPGQGLEWMGIINPSGGSTSYAQKFQGRVTMTRDTSTSTVYMELSSLRSEDTAVYYC

SEQ ID NO: 26 - protein, 15 aa, Artificial Sequence
  Humanized sequences of CHA.7.518 antibody VH
YFDYWGQGTLVTVSS

SEQ ID NO: 27 - protein, 120 aa, Artificial Sequence
  Humanized sequences of CHA.7.518 antibody VH
  MOD_RES (33)..(33): Asn, Gln, Ser or Ala
  MOD_RES (105)..(105): Asn, Gln, Ser or Ala
EVQLQQSGPELVKPGASVKISCKASGYTFTDYXINWVKQSHGKSLEWIGYIYPYIGGSGYNQKFKSKATLSADNPSSTAYMELRSLTSEDSAVYYCAREDKTARXAMDYWGQGTPVTVSS

SEQ ID NO: 28 - protein, 98 aa, Artificial Sequence
  Humanized sequences of CHA.7.518 antibody VH
  MOD_RES (33)..(33): Tyr, Gln, Ser or Ala
QVQLVQSGAEVKKPGASVKVSCKASGYTFTSYXMHWVRQAPGQGLEWMGIINPSGGSTSYAQKFQGRVTMTRDTSTSTVYMELSSLRSEDTAVYYCAR

SEQ ID NO: 29 - protein, 120 aa, Artificial Sequence
  Humanized sequences of CHA.7.518 antibody VH
  MOD_RES (33)..(33): Asn, Gln, Ser or Ala
  MOD_RES (105)..(105): Asn, Gln, Ser or Ala
QVQLVQSGAEVKKPGASVKVSCKASGYTFTDYXINWVRQAPGQGLEWMGYIYPYIGGSGYAQKFQGRVTMTRDTSTSTVYMELSSLRSEDTAVYYCAREDKTARXAMDYWGQGTLVTVSS

SEQ ID NO: 30 - protein, 120 aa, Artificial Sequence
  Humanized sequences of CHA.7.518 antibody VH
  MOD_RES (33)..(33): Asn, Gln, Ser or Ala
  MOD_RES (105)..(105): Asn, Gln, Ser or Ala
QVQLVQSGAEVKKPGASVKVSCKASGYTFTDYXINWVRQAPGQGLEWIGYIYPYIGGSGYAQKFQGRVTMTADTSTSTVYMELSSLRSEDTAVYYCAREDKTARXAMDYWGQGTLVTVSS

SEQ ID NO: 31 - protein, 120 aa, Artificial Sequence
  Humanized sequences of CHA.7.518 antibody VH
  MOD_RES (33)..(33): Asn, Gln, Ser or Ala
  MOD_RES (105)..(105): Asn, Gln, Ser or Ala
QVQLVQSGAEVKKPGASVKISCKASGYTFTDYXINWVRQAPGQGLEWIGYIYPYIGGSGYAQKFQGRATLTADTSTSTAYMELSSLRSEDTAVYYCAREDKTARXAMDYWGQGTLVTVSS

SEQ ID NO: 32 - protein, 120 aa, Artificial Sequence
  Humanized sequences of CHA.7.518 antibody VH
  MOD_RES (33)..(33): Asn, Gln, Ser or Ala
  MOD_RES (105)..(105): Asn, Gln, Ser or Ala
QVQLVQSGAEVKKPGASVKISCKASGYTFTDYXINWVRQAPGQGLEWIGYIYPYIGGSGYAQKFQGRATLTADNSTSTAYMELSSLRSEDTAVYYCAREDKTARXAMDYWGQGTLVTVSS

SEQ ID NO: 33 - protein, 96 aa, Artificial Sequence
  Humanized sequences of CHA.7.518 antibody VL
DIQMTQSPSSLSASVGDRVTITCRASQSISSYLNWYQQKPGKAPKLLIYAASSLQSGVPSRFSGSGSGTDFTLTISSLQPEDFATYYCQQSYSTPP

SEQ ID NO: 34 - protein, 12 aa, Artificial Sequence
  Humanized sequences of CHA.7.518 antibody VL
YTFGQGTKLEIK

SEQ ID NO: 35 - protein, 107 aa, Artificial Sequence
  Humanized sequences of CHA.7.518 antibody VL
  MOD_RES (28)..(28): Asn, Gln, Ser, Ala or Asp
  MOD_RES (32)..(32): Asn, Gln, Ser, Ala or Asp
  MOD_RES (53)..(53): Asn, Gln, Ser, Ala or Asp
  MOD_RES (92)..(92): Trp, Tyr, Phe or His
DIQMTQSPASLSVSVGETVTIICRVSEXIYSXLAWYQQKQGKSPQLLVYEATXLAEGVPSRFSGSGSGTQYSLKINSLQSEDFGSYYCQHFXGTPYTFGGGTKLEIK

SEQ ID NO: 36 - protein, 96 aa, Artificial Sequence
  Humanized sequences of CHA.7.518 antibody VL
  MOD_RES (28)..(28): Gln, Ser, Ala or Asp
  MOD_RES (32)..(32): Tyr, Gln, Ser, Ala or Asp
  MOD_RES (53)..(53): Gln, Ser, Ala or Asp
  MOD_RES (92)..(92): Tyr, Phe or His
DIQMTQSPSSLSASVGDRVTITCRASQXISSXLNWYQQKPGKAPKLLIYAASXLQSGVPSRFSGSGSGTDFTLTISSLQPEDFATYYCQQSXSTPP

SEQ ID NO: 37 - protein, 107 aa, Artificial Sequence
  Humanized sequences of CHA.7.518 antibody VL
  MOD_RES (28)..(28): Asn, Gln, Ser, Ala or Asp
  MOD_RES (32)..(32): Asn, Gln, Ser, Ala or Asp
  MOD_RES (53)..(53): Asn, Gln, Ser, Ala or Asp
  MOD_RES (92)..(92): Trp, Tyr, Phe or His
DIQMTQSPSSLSASVGDRVTITCRVSEXIYSXLAWYQQKPGKAPKLLIYEATXLAEGVPSRFSGSGSGTDFTLTISSLQPEDFATYYCQHFXGTPYTFGQGTKLEIK

SEQ ID NO: 38 - protein, 107 aa, Artificial Sequence
  Humanized sequences of CHA.7.518 antibody VL
  MOD_RES (28)..(28): Asn, Gln, Ser, Ala or Asp
  MOD_RES (32)..(32): Asn, Gln, Ser, Ala or Asp
  MOD_RES (53)..(53): Asn, Gln, Ser, Ala or Asp
  MOD_RES (92)..(92): Trp, Tyr, Phe or His
DIQMTQSPSSLSASVGDRVTITCRVSEXIYSXLAWYQQKPGKAPKLLIYEATXLAEGVPSRFSGSGSGTDYTLTISSLQPEDFATYYCQHFXGTPYTFGQGTKLEIK

SEQ ID NO: 39 - protein, 107 aa, Artificial Sequence
  Humanized sequences of CHA.7.518 antibody VL
  MOD_RES (28)..(28): Asn, Gln, Ser, Ala or Asp
  MOD_RES (32)..(32): Asn, Gln, Ser, Ala or Asp
  MOD_RES (53)..(53): Asn, Gln, Ser, Ala or Asp
  MOD_RES (92)..(92): Trp, Tyr, Phe or His
DIQMTQSPSSLSASVGDRVTITCRVSEXIYSXLAWYQQKPGKAPKLLVYEATXLAEGVPSRFSGSGSGTDYTLTISSLQPEDFGTYYCQHFXGTPYTFGQGTKLEIK

SEQ ID NO: 40 - protein, 98 aa, Artificial Sequence
  Humanized sequences of CHA.7.538_1 antibody VH
QVQLVQSGAEVKKPGASVKVSCKASGYTFTSYYMHWVRQAPGQGLEWMGIINPSGGSTSYAQKFQGRVTMTRDTSTSTVYMELSSLRSEDTAVYYCAR

SEQ ID NO: 41 - protein, 15 aa, Artificial Sequence
  Humanized sequences of CHA.7.538_1 antibody VH
YFDYWGQGTLVTVSS

SEQ ID NO: 42 - protein, 119 aa, Artificial Sequence
  Humanized sequences of CHA.7.538_1 antibody VH
  MOD_RES (31)..(31): Asn, Gln, Ser or Ala
  MOD_RES (52)..(52): Asn, Gln, Ser or Ala
  MOD_RES (105)..(105): Trp, Tyr, Phe or His
QVQLQQSGAELVRPGASVKVSCKTSGYAFTXYLIEWVKQRPGQGLEWIGVIXPGSGGIYYNDKFKVKTTLTADKSSSTAYMQLSSLTSDDSAVYFCARSETHDTXFAYWGQGTLVTVSA

SEQ ID NO: 43 - protein, 98 aa, Artificial Sequence
  Humanized sequences of CHA.7.538_1 antibody VH
  MOD_RES (31)..(31): Gln, Ser or Ala
  MOD_RES (52)..(52): Asn, Gln, Ser or Ala
QVQLVQSGAEVKKPGASVKVSCKASGYTFTXYYMHWVRQAPGQGLEWMGIIXPSGGSTSYAQKFQGRVTMTRDTSTSTVYMELSSLRSEDTAVYYCAR

SEQ ID NO: 44 - protein, 119 aa, Artificial Sequence
  Humanized sequences of CHA.7.538_1 antibody VH
  MOD_RES (31)..(31): Asn, Gln, Ser or Ala
  MOD_RES (52)..(52): Asn, Gln, Ser or Ala
  MOD_RES (105)..(105): Trp, Tyr, Phe or His
QVQLVQSGAEVKKPGASVKVSCKASGYAFTXYLIEWVRQAPGQGLEWMGVIXPGSGGIYYAQKFQGRVTMTRDTSTSTVYMELSSLRSEDTAVYYCARSETHDTXFAYWGQGTLVTVSS

SEQ ID NO: 45 - protein, 119 aa, Artificial Sequence
  Humanized sequences of CHA.7.538_1 antibody VH
  MOD_RES (31)..(31): Asn, Gln, Ser or Ala
  MOD_RES (52)..(52): Asn, Gln, Ser or Ala
  MOD_RES (105)..(105): Trp, Tyr, Phe or His
QVQLVQSGAEVKKPGASVKVSCKASGYAFTXYLIEWVRQAPGQGLEWIGVIXPGSGGIYYAQKFQGRVTMTADTSTSTVYMELSSLRSEDTAVYYCARSETHDTXFAYWGQGTLVTVSS

SEQ ID NO: 46 - protein, 119 aa, Artificial Sequence
  Humanized sequences of CHA.7.538_1 antibody VH
  MOD_RES (31)..(31): Asn, Gln, Ser or Ala
  MOD_RES (52)..(52): Asn, Gln, Ser or Ala
  MOD_RES (105)..(105): Trp, Tyr, Phe or His
QVQLVQSGAEVKKPGASVKVSCKTSGYAFTXYLIEWVRQAPGQGLEWIGVIXPGSGGIYYAQKFQGRVTLTADTSTSTAYMELSSLRSEDTAVYYCARSETHDTXFAYWGQGTLVTVSS

SEQ ID NO: 47 - protein, 119 aa, Artificial Sequence
  Humanized sequences of CHA.7.538_1 antibody VH
  MOD_RES (31)..(31): Asn, Gln, Ser or Ala
  MOD_RES (52)..(52): Asn, Gln, Ser or Ala
  MOD_RES (105)..(105): Trp, Tyr, Phe or His
QVQLVQSGAEVKKPGASVKVSCKTSGYAFTXYLIEWVRQAPGQGLEWIGVIXPGSGGIYYAQKFQGRVTLTADKSTSTAYMELSSLRSEDTAVYYCARSETHDTXFAYWGQGTLVTVSS

SEQ ID NO: 48 - protein, 96 aa, Artificial Sequence; identical to SEQ ID NO: 33
  Humanized sequences of CHA.7.538_1 antibody VL

SEQ ID NO: 49 - protein, 12 aa, Artificial Sequence
  Humanized sequences of CHA.7.538_1 antibody VL
YTFGQGTKLEIK

SEQ ID NO: 50 - protein, 96 aa, Artificial Sequence
  Humanized sequences of CHA.7.538_1 antibody VL
DIQMTQSPSSLSASVGDRVTITCRASQGIRNDLGWYQQKPGKAPKRLIYAASSLQSGVPSRFSGSGSGTEFTLTISNLQPEDFATYYCLQHNSYPP

SEQ ID NO: 51 - protein, 107 aa, Artificial Sequence
  Humanized sequences of CHA.7.538_1 antibody VL
  MOD_RES (92)..(92): Trp, Tyr, Phe or His
  MOD_RES (93)..(93): Asn, Gln, Ser, Ala or Asp
DIVMTQSQKFISTSVGDRVSITCKASQSVRIAVAWFQQKPGQSPKALIYLASTRHTGVPDRFTGSGSGTDFTLTISNVQSEDLADYFCLQHXXYPYTFGGGTKLEIK

SEQ ID NO: 52 - protein, 96 aa, Artificial Sequence
  Humanized sequences of CHA.7.538_1 antibody VL
  MOD_RES (92)..(92): Tyr, Phe or His
  MOD_RES (93)..(93): Gln, Ser, Ala or Asp
DIQMTQSPSSLSASVGDRVTITCRASQSISSYLNWYQQKPGKAPKLLIYAASSLQSGVPSRFSGSGSGTDFTLTISSLQPEDFATYYCQQSXXTPP

SEQ ID NO: 53 - protein, 107 aa, Artificial Sequence
  Humanized sequences of CHA.7.538_1 antibody VL
  MOD_RES (92)..(92): Trp, Tyr, Phe or His
  MOD_RES (93)..(93): Asn, Gln, Ser, Ala or Asp
DIQMTQSPSSLSASVGDRVTITCKASQSVRIAVAWYQQKPGKAPKLLIYLASTRHTGVPSRFSGSGSGTDFTLTISSLQPEDFATYYCLQHXXYPYTFGQGTKLEIK

SEQ ID NO: 54 - protein, 107 aa, Artificial Sequence
  Humanized sequences of CHA.7.538_1 antibody VL
  MOD_RES (92)..(92): Trp, Tyr, Phe or His
  MOD_RES (93)..(93): Asn, Gln, Ser, Ala or Asp
DIQMTQSPSSLSASVGDRVTITCKASQSVRIAVAWFQQKPGKAPKALIYLASTRHTGVPSRFSGSGSGTDFTLTISSVQPEDFATYYCLQHXXYPYTFGQGTKLEIK

SEQ ID NO: 55 - protein, 98 aa, Artificial Sequence; identical to SEQ ID NO: 40
  Humanized sequences of CHA.7.538_2 antibody VH

SEQ ID NO: 56 - protein, 15 aa, Artificial Sequence
  Humanized sequences of CHA.7.538_2 antibody VH
YFDYWGQGTLVTVSS

SEQ ID NO: 57 - protein, 120 aa, Artificial Sequence
  Humanized sequences of CHA.7.538_2 antibody VH
  MOD_RES (31)..(31): Asn, Gln, Ser or Ala
  MOD_RES (33)..(33): Trp, Tyr, Phe or His
  MOD_RES (59)..(59): Asn, Gln, Ser or Ala
QVQLQQSGAELVRPGTSVKMSCKAAGYTFTXYXIGWVKQRPGHGLEWIGDIYPGGGYTXYNEKFKGKATLTADTSSSTAYMQLSSLTSEDSAIYYCASPYYGSSYGFAFWGQGTLVTVSA

SEQ ID NO: 58 - protein, 98 aa, Artificial Sequence
  Humanized sequences of CHA.7.538_2 antibody VH
  MOD_RES (31)..(31): Gln, Ser or Ala
  MOD_RES (33)..(33): Tyr, Phe or His
  MOD_RES (59)..(59): Gln, Ser or Ala
QVQLVQSGAEVKKPGASVKVSCKASGYTFTXYXMHWVRQAPGQGLEWMGIINPSGGSTXYAQKFQGRVTMTRDTSTSTVYMELSSLRSEDTAVYYCAR

SEQ ID NO: 59 - protein, 120 aa, Artificial Sequence
  Humanized sequences of CHA.7.538_2 antibody VH
  MOD_RES (31)..(31): Asn, Gln, Ser or Ala
  MOD_RES (33)..(33): Trp, Tyr, Phe or His
  MOD_RES (59)..(59): Asn, Gln, Ser or Ala
QVQLVQSGAEVKKPGASVKVSCKASGYTFTXYXIGWVRQAPGQGLEWMGDIYPGGGYTXYAQKFQGRVTMTRDTSTSTVYMELSSLRSEDTAVYYCARPYYGSSYGFAFWGQGTLVTVSS

SEQ ID NO: 60 - protein, 120 aa, Artificial Sequence
  Humanized sequences of CHA.7.538_2 antibody VH
  MOD_RES (31)..(31): Asn, Gln, Ser or Ala
  MOD_RES (33)..(33): Trp, Tyr, Phe or His
  MOD_RES (59)..(59): Asn, Gln, Ser or Ala
QVQLVQSGAEVKKPGASVKVSCKASGYTFTXYXIGWVRQAPGQGLEWIGDIYPGGGYTXYAQKFQGRVTMTADTSTSTVYMELSSLRSEDTAVYYCASPYYGSSYGFAFWGQGTLVTVSS

SEQ ID NO: 61 - protein, 120 aa, Artificial Sequence
  Humanized sequences of CHA.7.538_2 antibody VH
  MOD_RES (31)..(31): Asn, Gln, Ser or Ala
  MOD_RES (33)..(33): Trp, Tyr, Phe or His
  MOD_RES (59)..(59): Asn, Gln, Ser or Ala
QVQLVQSGAEVKKPGASVKMSCKASGYTFTXYXIGWVRQAPGQGLEWIGDIYPGGGYTXYAQKFQGRATLTADTSTSTAYMELSSLRSEDTAVYYCASPYYGSSYGFAFWGQGTLVTVSS

SEQ ID NO: 62 - protein, 120 aa, Artificial Sequence; identical to SEQ ID NO: 5
  humanized CHA.7.518 VH h518HH1

SEQ ID NO: 63 - protein, 120 aa, Artificial Sequence
  humanized CHA.7.518 VH h518HH2
QVQLVQSGAEVKKPGASVKVSCKASGYTFTDYNINWVRQAPGQGLEWIGYIYPYIGGSGYAQKFQGRVTMTADTSTSTVYMELSSLRSEDTAVYYCAREDKTARNAMDYWGQGTLVTVSS

SEQ ID NO: 64 - protein, 120 aa, Artificial Sequence
  humanized CHA.7.518 VH h518HH3
QVQLVQSGAEVKKPGASVKISCKASGYTFTDYNINWVRQAPGQGLEWIGYIYPYIGGSGYAQKFQGRATLTADTSTSTAYMELSSLRSEDTAVYYCAREDKTARNAMDYWGQGTLVTVSS

SEQ ID NO: 65 - protein, 120 aa, Artificial Sequence
  humanized CHA.7.518 VH h518HH4
QVQLVQSGAEVKKPGASVKISCKASGYTFTDYNINWVRQAPGQGLEWIGYIYPYIGGSGYAQKFQGRATLTADNSTSTAYMELSSLRSEDTAVYYCAREDKTARNAMDYWGQGTLVTVSS

SEQ ID NO: 66 - protein, 107 aa, Artificial Sequence; identical to SEQ ID NO: 10
  humanized CHA.7.518 VL h518HL1

SEQ ID NO: 67 - protein, 107 aa, Artificial Sequence
  humanized CHA.7.518 VL h518HL2
DIQMTQSPSSLSASVGDRVTITCRVSENIYSNLAWYQQKPGKAPKLLIYEATNLAEGVPSRFSGSGSGTDYTLTISSLQPEDFATYYCQHFWGTPYTFGQGTKLEIK

SEQ ID NO: 68 - protein, 107 aa, Artificial Sequence
  humanized CHA.7.518 VL h518HL3
DIQMTQSPSSLSASVGDRVTITCRVSENIYSNLAWYQQKPGKAPKLLVYEATNLAEGVPSRFSGSGSGTDYTLTISSLQPEDFGTYYCQHFWGTPYTFGQGTKLEIK

SEQ ID NO: 69 - protein, 119 aa, Artificial Sequence
  humanized CHA.7.538_1 VH h5381HH1
QVQLVQSGAEVKKPGASVKVSCKASGYAFTNYLIEWVRQAPGQGLEWMGVINPGSGGIYYAQKFQGRVTMTRDTSTSTVYMELSSLRSEDTAVYYCARSETHDTWFAYWGQGTLVTVSS

SEQ ID NO: 70 - protein, 119 aa, Artificial Sequence; identical to SEQ ID NO: 15
  humanized CHA.7.538_1 VH h5381HH2

SEQ ID NO: 71 - protein, 119 aa, Artificial Sequence
  humanized CHA.7.538_1 VH h5381HH3
QVQLVQSGAEVKKPGASVKVSCKTSGYAFTNYLIEWVRQAPGQGLEWIGVINPGSGGIYYAQKFQGRVTLTADTSTSTAYMELSSLRSEDTAVYYCARSETHDTWFAYWGQGTLVTVSS

SEQ ID NO: 72 - protein, 119 aa, Artificial Sequence
  humanized CHA.7.538_1 VH h5381HH4
QVQLVQSGAEVKKPGASVKVSCKTSGYAFTNYLIEWVRQAPGQGLEWIGVINPGSGGIYYAQKFQGRVTLTADKSTSTAYMELSSLRSEDTAVYYCARSETHDTWFAYWGQGTLVTVSS

SEQ ID NO: 73 - protein, 107 aa, Artificial Sequence
  humanized CHA.7.538_1/538_2 VL h538HL1
DIQMTQSPSSLSASVGDRVTITCKASQSVRIAVAWYQQKPGKAPKLLIYLASTRHTGVPSRFSGSGSGTDFTLTISSLQPEDFATYYCLQHWNYPYTFGQGTKLEIK

SEQ ID NO: 74 - protein, 107 aa, Artificial Sequence; identical to SEQ ID NO: 20
  humanized CHA.7.538_1/538_2 VL h538HL2

SEQ ID NO: 75 - protein, 120 aa, Artificial Sequence
  humanized CHA.7.538_2 VH h5382HH1
QVQLVQSGAEVKKPGASVKVSCKASGYTFTNYWIGWVRQAPGQGLEWMGDIYPGGGYTNYAQKFQGRVTMTRDTSTSTVYMELSSLRSEDTAVYYCARPYYGSSYGFAFWGQGTLVTVSS

SEQ ID NO: 76 - protein, 120 aa, Artificial Sequence
  humanized CHA.7.538_2 VH h5382HH2
QVQLVQSGAEVKKPGASVKVSCKASGYTFTNYWIGWVRQAPGQGLEWIGDIYPGGGYTNYAQKFQGRVTMTADTSTSTVYMELSSLRSEDTAVYYCASPYYGSSYGFAFWGQGTLVTVSS

SEQ ID NO: 77 - protein, 120 aa, Artificial Sequence
  humanized CHA.7.538_2 VH h5382HH3
QVQLVQSGAEVKKPGASVKMSCKASGYTFTNYWIGWVRQAPGQGLEWIGDIYPGGGYTNYAQKFQGRATLTADTSTSTAYMELSSLRSEDTAVYYCASPYYGSSYGFAFWGQGTLVTVSS

SEQ ID NO: 78 - protein, 107 aa, Artificial Sequence; identical to SEQ ID NO: 73
  humanized CHA.7.538_1/538_2 VL h538HL1

SEQ ID NO: 79 - protein, 107 aa, Artificial Sequence; identical to SEQ ID NO: 20
  humanized CHA.7.538_1/538_2 VL h538HL2

SEQ ID NO: 80 - protein, 131 aa, Artificial Sequence
  Sequence alignment of PVRIG orthologs
TPEVWVQVRMEATELSSFTIRCGFLGSGSISLVTVSWGGPNGAGGTTLAVLHPERGIRQWAPARQARWETQSSISLILEGSGASSPCANTTFCCKFASFPEGSWEACGSLPPSSDPGLSAPPTPAPILRAD

SEQ ID NO: 81 - protein, 131 aa, Artificial Sequence
  Sequence alignment of PVRIG orthologs
TPEVWVQVQMEATELSSFTVHCGFLGPGSISLVTVSWGGPDGAGGTKLAVLHPELGTRQWAPARQARWETQSSISLALEDSGASSPFANTTFCCKFASFPEGSWESCGSLPPSSDPGLSAPPTPVPILRAD

SEQ ID NO: 82 - protein, 126 aa, Artificial Sequence
  Sequence alignment of PVRIG orthologs
TPEVWVQVQMKATELSSFIVHCGFLGSGSISLVTVSWGGPDGAGGTRLAVLHPELGTRQWAPAHQARWETQSSISLVLEEPGASSPSANTTFCCKFASFPEGSWEACGSLPPSSDPGLSAPILRAD

SEQ ID NO: 83 - protein, 131 aa, Artificial Sequence; identical to SEQ ID NO: 81
  Sequence alignment of PVRIG orthologs

SEQ ID NO: 84 - protein, 166 aa, Artificial Sequence
  Heavy chain: Amino acid sequence
MEWNWVFLFLLSVTAGVHSQVQLQQSGAELAKPGSSVMISCKASGYTFTNYAVHWIKQTTGQALEWTGYIAPGSGVTKYNEKFKGKATLTVDKSSTTAYMQLSSLTPVDTAVYYCASGTTRFAYWGQGTLVTVSSAQTTAPSVYPLAPGCGDTTSSTVTLGCLVKG

SEQ ID NO: 85 - DNA, 498 bp, Artificial Sequence
  Heavy chain: DNA sequence
atggaatggaactgggtctttctcttcctcctgtcagtaactgcaggagtccactcccaggtccagctgcagcagtctggagctgagctggcaaagcctggctcttcagtgatgatttcctgcaaggcttctggttacacctttaccaactatgctgtgcactggataaagcagacgactggacaggcccttgagtggactggatatattgctcctggaagtggagttactaaatacaatgagaagttcaagggcaaggccacattgactgtagacaaatcctcaaccacagcctacatgcaactcagcagcctgacacctgtggacactgcggtctattactgtgcaagcggaactacgaggtttgcttattggggccaaggcactctggtcactgtctcttcagcccaaacaacagccccatctgtctatccactggctcctggatgtggtgatacaaccagctccacggtgactctgggatgcctggtcaagggc

SEQ ID NO: 86 - protein, 130 aa, Artificial Sequence
  Light chain: Amino acid sequence
METDTLLLWVLLLWVPGSTGDIVLTQSPALAVSLGQRATISCRASQSVSLSSYNLMQWYQQKPGQEPKILIYDASNLPSGIPARFSGSGSGTDFTLTIDPVQADDIATYYCQQSKDDPLTFGSGTKLEIK

SEQ ID NO: 87 - DNA, 390 bp, Artificial Sequence
  Light chain: DNA sequence
atggagacagacacactcctgctatgggtgctgctgctctgggttccaggctccactggtgacattgtgctgacccagtctcctgctttggctgtgtctctagggcagagggccacaatctcctgtagagccagccaaagtgtcagtttatccagctataatctcatgcagtggtaccaacagaaaccaggacaggaacccaaaatcctcatctatgatgcatccaacctaccatctgggatccctgccaggttcagtggcagtgggtctgggacagacttcaccctcaccattgatcctgtgcaggctgatgatattgcaacctattactgtcagcagagtaaggatgacccgctcacgttcggttctgggaccaagctggagatcaaa

SEQ ID NO: 88 - protein, 330 aa, Artificial Sequence
  Human IgG1 constant region
ASTKGPSVFPLAPSSKSTSGGTAALGCLVKDYFPEPVTVSWNSGALTSGVHTFPAVLQSSGLYSLSSVVTVPSSSLGTQTYICNVNHKPSNTKVDKKVEPKSCDKTHTCPPCPAPELLGGPSVFLFPPKPKDTLMISRTPEVTCVVVDVSHEDPEVKFNWYVDGVEVHNAKTKPREEQYNSTYRVVSVLTVLHQDWLNGKEYKCKVSNKALPAPIEKTISKAKGQPREPQVYTLPPSREEMTKNQVSLTCLVKGFYPSDIAVEWESNGQPENNYKTTPPVLDSDGSFFLYSKLTVDKSRWQQGNVFSCSVMHEALHNHYTQKSLSLSPGK

SEQ ID NO: 89 - protein, 330 aa, Artificial Sequence
  Human IgG1 D265A constant region
ASTKGPSVFPLAPSSKSTSGGTAALGCLVKDYFPEPVTVSWNSGALTSGVHTFPAVLQSSGLYSLSSVVTVPSSSLGTQTYICNVNHKPSNTKVDKKVEPKSCDKTHTCPPCPAPELLGGPSVFLFPPKPKDTLMISRTPEVTCVVVAVSHEDPEVKFNWYVDGVEVHNAKTKPREEQYNSTYRVVSVLTVLHQDWLNGKEYKCKVSNKALPAPIEKTISKAKGQPREPQVYTLPPSREEMTKNQVSLTCLVKGFYPSDIAVEWESNGQPENNYKTTPPVLDSDGSFFLYSKLTVDKSRWQQGNVFSCSVMHEALHNHYTQKSLSLSPGK

SEQ ID NO: 90 - protein, 330 aa, Artificial Sequence
  Human IgG1 N297A constant region
ASTKGPSVFPLAPSSKSTSGGTAALGCLVKDYFPEPVTVSWNSGALTSGVHTFPAVLQSSGLYSLSSVVTVPSSSLGTQTYICNVNHKPSNTKVDKKVEPKSCDKTHTCPPCPAPELLGGPSVFLFPPKPKDTLMISRTPEVTCVVVDVSHEDPEVKFNWYVDGVEVHNAKTKPREEQYASTYRVVSVLTVLHQDWLNGKEYKCKVSNKALPAPIEKTISKAKGQPREPQVYTLPPSREEMTKNQVSLTCLVKGFYPSDIAVEWESNGQPENNYKTTPPVLDSDGSFFLYSKLTVDKSRWQQGNVFSCSVMHEALHNHYTQKSLSLSPGK

SEQ ID NO: 91 - protein, 326 aa, Artificial Sequence
  Human IgG2 constant region
ASTKGPSVFPLAPCSRSTSESTAALGCLVKDYFPEPVTVSWNSGALTSGVHTFPAVLQSSGLYSLSSVVTVPSSNFGTQTYTCNVDHKPSNTKVDKTVERKCCVECPPCPAPPVAGPSVFLFPPKPKDTLMISRTPEVTCVVVDVSHEDPEVQFNWYVDGVEVHNAKTKPREEQFNSTFRVVSVLTVVHQDWLNGKEYKCKVSNKGLPAPIEKTISKTKGQPREPQVYTLPPSREEMTKNQVSLTCLVKGFYPSDIAVEWESNGQPENNYKTTPPMLDSDGSFFLYSKLTVDKSRWQQGNVFSCSVMHEALHNHYTQKSLSLSPGK

SEQ ID NO: 92 - protein, 377 aa, Artificial Sequence
  Human IgG3 constant region
ASTKGPSVFPLAPCSRSTSGGTAALGCLVKDYFPEPVTVSWNSGALTSGVHTFPAVLQSSGLYSLSSVVTVPSSSLGTQTYTCNVNHKPSNTKVDKRVELKTPLGDTTHTCPRCPEPKSCDTPPPCPRCPEPKSCDTPPPCPRCPEPKSCDTPPPCPRCPAPELLGGPSVFLFPPKPKDTLMISRTPEVTCVVVDVSHEDPEVQFKWYVDGVEVHNAKTKPREEQYNSTFRVVSVLTVLHQDWLNGKEYKCKVSNKALPAPIEKTISKTKGQPREPQVYTLPPSREEMTKNQVSLTCLVKGFYPSDIAVEWESSGQPENNYNTTPPMLDSDGSFFLYSKLTVDKSRWQQGNIFSCSVMHEALHNRFTQKSLSLSPGK

SEQ ID NO: 93 - protein, 327 aa, Artificial Sequence
  Human IgG4 constant region (Wild Type)
ASTKGPSVFPLAPCSRSTSESTAALGCLVKDYFPEPVTVSWNSGALTSGVHTFPAVLQSSGLYSLSSVVTVPSSSLGTKTYTCNVDHKPSNTKVDKRVESKYGPPCPSCPAPEFLGGPSVFLFPPKPKDTLMISRTPEVTCVVVDVSQEDPEVQFNWYVDGVEVHNAKTKPREEQFNSTYRVVSVLTVLHQDWLNGKEYKCKVSNKGLPSSIEKTISKAKGQPREPQVYTLPPSQEEMTKNQVSLTCLVKGFYPSDIAVEWESNGQPENNYKTTPPVLDSDGSFFLYSRLTVDKSRWQEGNVFSCSVMHEALHNHYTQKSLSLSPGK

SEQ ID NO: 94 - protein, 327 aa, Artificial Sequence
  Human IgG4 constant region (S241P hinge mutant)
ASTKGPSVFPLAPCSRSTSESTAALGCLVKDYFPEPVTVSWNSGALTSGVHTFPAVLQSSGLYSLSSVVTVPSSSLGTKTYTCNVDHKPSNTKVDKRVESKYGPPCPPCPAPEFLGGPSVFLFPPKPKDTLMISRTPEVTCVVVDVSQEDPEVQFNWYVDGVEVHNAKTKPREEQFNSTYRVVSVLTVLHQDWLNGKEYKCKVSNKGLPSSIEKTISKAKGQPREPQVYTLPPSQEEMTKNQVSLTCLVKGFYPSDIAVEWESNGQPENNYKTTPPVLDSDGSFFLYSRLTVDKSRWQEGNVFSCSVMHEALHNHYTQKSLSLSPGK

SEQ ID NO: 95 - protein, 107 aa, Artificial Sequence [sequence omitted]

SEQ ID NO: 96 - protein, 106 aa, Artificial Sequence
  Human lambda light chain
GQPKAAPSVTLFPPSSEELQANKATLVCLISDFYPGAVTVAWKADSSPVKAGVETTTPSKQSNNKYAASSYLSLTPEQWKSHRSYSCQVTHEGSTVEKTVAPTECS

SEQ ID NO: 97 - protein, 120 aa, Artificial Sequence
  Human TIGIT ECD
MMTGTIETTGNISAEKGGSIILQCHLSSTTAQVTQVNWEQQDQLLAICNADLGWHISPSFKDRVAPGPGLGLTLQSLTVNDTGEYFCIYHTYPDGTYTGRIFLEVLESSVAEHGARFQIP

SEQ ID NO: 98 - protein, 121 aa, Artificial Sequence
  Cyno macaque TIGIT ECD
MMTGTIETTGNISAKKGGSVILQCHLSSTMAQVTQVNWEQHDHSLLAIRNAELGWHIYPAFKDRVAPGPGLGLTLQSLTMNDTGEYFCTYHTYPDGTYRGRIFLEVLESSVAEHSARFQIP

SEQ ID NO: 99 - protein, 316 aa, Artificial Sequence
  Human PVR ECD
DVVVQAPTQVPGFLGDSVTLPCYLQVPNMEVTHVSQLTWARHGESGSMAVFHQTQGPSYSESKRLEFVAARLGAELRNASLRMFGLRVEDEGNYTCLFVTFPQGSRSVDIWLRVLAKPQNTAEVQKVQLTGEPVPMARCVSTGGRPPAQITWHSDLGGMPNTSQVPGFLSGTVTVTSLWILVPSSQVDGKNVTCKVEHESFEKPQLLTVNLTVYYPPEVSISGYDNNWYLGQNEATLTCDARSNPEPTGYNWSTTMGPLPPFAVAQGAQLLIRPVDKPINTTLICNVTNALGARQAELTVQVKEGPPSEHSGMSRN

SEQ ID NO: 100 - protein, 121 aa, Artificial Sequence
  CPA.9.018 Variable heavy (vh) domain
QVQLVESGGGLVQPGGSLRLSCAASGFTFSSYGMHWVRQAPGKGLEWVAFIRYDGSNKYYADSVKGRFTISRDNSKNTLYLQMNSLRAEDTAVYYCAKEMLVQDYYYMDVWGQGTTVTVSS

SEQ ID NO: 101 - protein, 8 aa, Artificial Sequence
  vhCDR1
GFTFSSYG

SEQ ID NO: 102 - protein, 8 aa, Artificial Sequence
  vhCDR2
IRYDGSNK

SEQ ID NO: 103 - protein, 14 aa, Artificial Sequence
  vhCDR3
AKEMLVQDYYYMDV

SEQ ID NO: 104 - protein, 448 aa, Artificial Sequence
  Full length HC (IgG4(S241P))
QVQLVESGGGLVQPGGSLRLSCAASGFTFSSYGMHWVRQAPGKGLEWVAFIRYDGSNKYYADSVKGRFTISRDNSKNTLYLQMNSLRAEDTAVYYCAKEMLVQDYYYMDVWGQGTTVTVSSASTKGPSVFPLAPCSRSTSESTAALGCLVKDYFPEPVTVSWNSGALTSGVHTFPAVLQSSGLYSLSSVVTVPSSSLGTKTYTCNVDHKPSNTKVDKRVESKYGPPCPPCPAPEFLGGPSVFLFPPKPKDTLMISRTPEVTCVVVDVSQEDPEVQFNWYVDGVEVHNAKTKPREEQFNSTYRVVSVLTVLHQDWLNGKEYKCKVSNKGLPSSIEKTISKAKGQPREPQVYTLPPSQEEMTKNQVSLTCLVKGFYPSDIAVEWESNGQPENNYKTTPPVLDSDGSFFLYSRLTVDKSRWQEGNVFSCSVMHEALHNHYTQKSLSLSPGK

SEQ ID NO: 105 - protein, 113 aa, Artificial Sequence
  Variable light (vl) domain
DVVMTQSPLSLPVSPGEPASISCRSSQNLLHRNGINYLNWYLQKPGQSPQLLIYWGSNRASGVPDRFSGSGSGTDFTLKISRVEAEDVGVYYCMQGLQIPPTFGQGTKVDIKR

SEQ ID NO: 106 - protein, 11 aa, Artificial Sequence
  vlCDR1
QNLLHRNGINY

SEQ ID NO: 107 - protein, 3 aa, Artificial Sequence
  vlCDR2
WGS

SEQ ID NO: 108 - protein, 9 aa, Artificial Sequence
  vlCDR3
MQGLQIPPT

SEQ ID NO: 109 - protein, 219 aa, Artificial Sequence
  Full length light chain
DVVMTQSPLSLPVSPGEPASISCRSSQNLLHRNGINYLNWYLQKPGQSPQLLIYWGSNRASGVPDRFSGSGSGTDFTLKISRVEAEDVGVYYCMQGLQIPPTFGQGTKVDIKRTVAAPSVFIFPPSDEQLKSGTASVVCLLNNFYPREAKVQWKVDNALQSGNSQESVTEQDSKDSTYSLSSTLTLSKADYEKHKVYACEVTHQGLSSPVTKSFNRGEC

SEQ ID NO: 110 - protein, 121 aa, Artificial Sequence
  CPA.9.027 Variable heavy (vh) domain
EVQLVETGGGLIQPGRSLRLSCAASGFTFSSYAMHWVRQAPGKGLEWVAVISYDGSNKYYADSVKGRFTISRDNSKNTLYLQMNSLRAEDTAVYYCARDPLPLHYYGMDVWGQGTTVTVSS

SEQ ID NO: 111 - protein, 8 aa, Artificial Sequence
  vhCDR1
GFTFSSYA

SEQ ID NO: 112 - protein, 8 aa, Artificial Sequence
  vhCDR2
ISYDGSNK

SEQ ID NO: 113 - protein, 14 aa, Artificial Sequence
  vhCDR3
ARDPLPLHYYGMDV

SEQ ID NO: 114 - protein, 448 aa, Artificial Sequence
  Full length HC (IgG4(S241P))
EVQLVETGGGLIQPGRSLRLSCAASGFTFSSYAMHWVRQAPGKGLEWVAVISYDGSNKYYADSVKGRFTISRDNSKNTLYLQMNSLRAEDTAVYYCARDPLPLHYYGMDVWGQGTTVTVSSASTKGPSVFPLAPCSRSTSESTAALGCLVKDYFPEPVTVSWNSGALTSGVHTFPAVLQSSGLYSLSSVVTVPSSSLGTKTYTCNVDHKPSNTKVDKRVESKYGPPCPPCPAPEFLGGPSVFLFPPKPKDTLMISRTPEVTCVVVDVSQEDPEVQFNWYVDGVEVHNAKTKPREEQFNSTYRVVSVLTVLHQDWLNGKEYKCKVSNKGLPSSIEKTISKAKGQPREPQVYTLPPSQEEMTKNQVSLTCLVKGFYPSDIAVEWESNGQPENNYKTTPPVLDSDGSFFLYSRLTVDKSRWQEGNVFSCSVMHEALHNHYTQKSLSLSPGK

SEQ ID NO: 115 - protein, 111 aa, Artificial Sequence
  Variable light (vl) domain
QSALTQPRSASGNPGQRVTISCSGSSSNMGRRPVNWYQQIPGTAPKLLIYSQNQRPSGVPDRFSGSQSGTSASLTISGLQSEDEAEYFCAVWDDSLSSLQLGGGTQLAVLG

SEQ ID NO: 116 - protein, 8 aa, Artificial Sequence
  vlCDR1
SSNMGRRP

SEQ ID NO: 117 - protein, 3 aa, Artificial Sequence
  vlCDR2
SQN

SEQ ID NO: 118 - protein, 11 aa, Artificial Sequence
  vlCDR3
AVWDDSLSSLQ

SEQ ID NO: 119 - protein, 216 aa, Artificial Sequence
  Full length light chain
QSALTQPRSASGNPGQRVTISCSGSSSNMGRRPVNWYQQIPGTAPKLLIYSQNQRPSGVPDRFSGSQSGTSASLTISGLQSEDEAEYFCAVWDDSLSSLQLGGGTQLAVLGQPKAAPSVTLFPPSSEELQANKATLVCLISDFYPGAVTVAWKADSSPVKAGVETTTPSKQSNNKYAASSYLSLTPEQWKSHRSYSCQVTHEGSTVEKTVAPTECS

SEQ ID NO: 120 - protein, 121 aa, Artificial Sequence; identical to SEQ ID NO: 110
  CPA.9.049 Variable heavy (vh) domain

SEQ ID NO: 121 - protein, 8 aa, Artificial Sequence
  vhCDR1
GFTFSSYA

SEQ ID NO: 122 - protein, 8 aa, Artificial Sequence
  vhCDR2
ISYDGSNK

SEQ ID NO: 123 - protein, 14 aa, Artificial Sequence
  vhCDR3
ARDPLPLHYYGMDV

SEQ ID NO: 124 - protein, 448 aa, Artificial Sequence; identical to SEQ ID NO: 114
  Full length HC (IgG4(S241P))

SEQ ID NO: 125 - protein, 111 aa, Artificial Sequence
  Variable light (vl) domain
QSALTQPRSASGNPGQRVTISCSGSSSNMGRRPVNWYQQIPGTAPKLLIYSQNQRPSGVPDRFSGSQSGTSASLTISGLQSEDEAEYFCAVWDDSLFSLLLGGGTQLAVLG

SEQ ID NO: 126 - protein, 8 aa, Artificial Sequence
  vlCDR1
SSNMGRRP

SEQ ID NO: 127 - protein, 3 aa, Artificial Sequence
  vlCDR2
SQN

SEQ ID NO: 128 - protein, 11 aa, Artificial Sequence
  vlCDR3
AVWDDSLFSLL

SEQ ID NO: 129 - protein, 216 aa, Artificial Sequence
  Full length light chain
QSALTQPRSASGNPGQRVTISCSGSSSNMGRRPVNWYQQIPGTAPKLLIYSQNQRPSGVPDRFSGSQSGTSASLTISGLQSEDEAEYFCAVWDDSLFSLLLGGGTQLAVLGQPKAAPSVTLFPPSSEELQANKATLVCLISDFYPGAVTVAWKADSSPVKAGVETTTPSKQSNNKYAASSYLSLTPEQWKSHRSYSCQVTHEGSTVEKTVAPTECS

SEQ ID NO: 130 - protein, 121 aa, Artificial Sequence
  CPA.9.057 Variable heavy (vh) domain
QVQLQESGPGLVKPSETLSLTCTVSGGSISSSSYYWGWIRQPPGKGLEWIGSIYYSGSTYYNPSLKSRVTISVDTSKNQFSLKLSSVTAADTAVYYCARQGAAAGNPFDIWGQGTMVTVSS

SEQ ID NO: 131 - protein, 10 aa, Artificial Sequence
  vhCDR1
GGSISSSSYY

SEQ ID NO: 132 - protein, 7 aa, Artificial Sequence
  vhCDR2
IYYSGST

SEQ ID NO: 133 - protein, 13 aa, Artificial Sequence
  vhCDR3
ARQGAAAGNPFDI

SEQ ID NO: 134 - protein, 448 aa, Artificial Sequence
  Full length HC (IgG4(S241P))
QVQLQESGPGLVKPSETLSLTCTVSGGSISSSSYYWGWIRQPPGKGLEWIGSIYYSGSTYYNPSLKSRVTISVDTSKNQFSLKLSSVTAADTAVYYCARQGAAAGNPFDIWGQGTMVTVSSASTKGPSVFPLAPCSRSTSESTAALGCLVKDYFPEPVTVSWNSGALTSGVHTFPAVLQSSGLYSLSSVVTVPSSSLGTKTYTCNVDHKPSNTKVDKRVESKYGPPCPPCPAPEFLGGPSVFLFPPKPKDTLMISRTPEVTCVVVDVSQEDPEVQFNWYVDGVEVHNAKTKPREEQFNSTYRVVSVLTVLHQDWLNGKEYKCKVSNKGLPSSIEKTISKAKGQPREPQVYTLPPSQEEMTKNQVSLTCLVKGFYPSDIAVEWESNGQPENNYKTTPPVLDSDGSFFLYSRLTVDKSRWQEGNVFSCSVMHEALHNHYTQKSLSLSPGK

SEQ ID NO: 135 - protein, 111 aa, Artificial Sequence
  Variable light (vl) domain
QSVLTQPPSVSGTPGQRVTISCSGSSSNIGSNFVYWHQQLTGTAPKLLIYRNTQRPSGVPDRFSGSKSGTSASLAIGGLRSEDEADYYCATWDDSLSAWVFGGGTKLTVLG

SEQ ID NO: 136 - protein, 8 aa, Artificial Sequence
  vlCDR1
SSNIGSNF

SEQ ID NO: 137 - protein, 3 aa, Artificial Sequence
  vlCDR2
RNT

SEQ ID NO: 138 - protein, 11 aa, Artificial Sequence
  vlCDR3
ATWDDSLSAWV

SEQ ID NO: 139 - protein, 216 aa, Artificial Sequence
  Full length light chain
QSVLTQPPSVSGTPGQRVTISCSGSSSNIGSNFVYWHQQLTGTAPKLLIYRNTQRPSGVPDRFSGSKSGTSASLAIGGLRSEDEADYYCATWDDSLSAWVFGGGTKLTVLGQPKAAPSVTLFPPSSEELQANKATLVCLISDFYPGAVTVAWKADSSPVKAGVETTTPSKQSNNKYAASSYLSLTPEQWKSHRSYSCQVTHEGSTVEKTVAPTECS

SEQ ID NO: 140 - protein, 119 aa, Artificial Sequence
  CPA.9.059 Variable heavy (vh) domain
EVQLVETGGGLIQPGGSLRLSCAASGFTVSSNYMSWVRQAPGKGLEWVSVIYSGGSTYYADSVKGRFTISRDNSKNTLYLQMNSLRAEDTAVYYCARGARYSYGQYPYWGQGTLVTVSS

SEQ ID NO: 141 - protein, 8 aa, Artificial Sequence
  vhCDR1
GFTVSSNY

SEQ ID NO: 142 - protein, 7 aa, Artificial Sequence
  vhCDR2
IYSGGST

SEQ ID NO: 143 - protein, 13 aa, Artificial Sequence
  vhCDR3
ARGARYSYGQYPY

SEQ ID NO: 144 - protein, 446 aa, Artificial Sequence
  Full length HC (IgG4(S241P))
EVQLVETGGGLIQPGGSLRLSCAASGFTVSSNYMSWVRQAPGKGLEWVSVIYSGGSTYYADSVKGRFTISRDNSKNTLYLQMNSLRAEDTAVYYCARGARYSYGQYPYWGQGTLVTVSSASTKGPSVFPLAPCSRSTSESTAALGCLVKDYFPEPVTVSWNSGALTSGVHTFPAVLQSSGLYSLSSVVTVPSSSLGTKTYTCNVDHKPSNTKVDKRVESKYGPPCPPCPAPEFLGGPSVFLFPPKPKDTLMISRTPEVTCVVVDVSQEDPEVQFNWYVDGVEVHNAKTKPREEQFNSTYRVVSVLTVLHQDWLNGKEYKCKVSNKGLPSSIEKTISKAKGQPREPQVYTLPPSQEEMTKNQVSLTCLVKGFYPSDIAVEWESNGQPENNYKTTPPVLDSDGSFFLYSRLTVDKSRWQEGNVFSCSVMHEALHNHYTQKSLSLSPGK

SEQ ID NO: 145 - protein, 109 aa, Artificial Sequence
  Variable light (vl) domain
DIQLTQSPSFLSASVGDRVTITCRASHDISSLFSWYQQKPGKAPKLLIYAASTLQTGVPSRFSGSASGTEFTLTISSLQPEDFATYYCLQLDSFPTWTFGQGTKVEIKR

SEQ ID NO: 146 - protein, 6 aa, Artificial Sequence
  vlCDR1
HDISSL

SEQ ID NO: 147 - protein, 3 aa, Artificial Sequence
  vlCDR2
AAS

SEQ ID NO: 148 - protein, 10 aa, Artificial Sequence
  vlCDR3
LQLDSFPTWT

SEQ ID NO: 149 - protein, 215 aa, Artificial Sequence
  Full length light chain
DIQLTQSPSFLSASVGDRVTITCRASHDISSLFSWYQQKPGKAPKLLIYAASTLQTGVPSRFSGSASGTEFTLTISSLQPEDFATYYCLQLDSFPTWTFGQGTKVEIKRTVAAPSVFIFPPSDEQLKSGTASVVCLLNNFYPREAKVQWKVDNALQSGNSQESVTEQDSKDSTYSLSSTLTLSKADYEKHKVYACEVTHQGLSSPVTKSFNRGEC

SEQ ID NO: 150 - protein, 121 aa, Artificial Sequence
  CPA.9.083  Variable heavy (vh) domain
EVQLVETGGGLIQPGRSLRLSCAASGFTFSSYAMHWVRQAPGKGLEWVAVISYDGTPVYYADSVKGRFTISRDNSKNTLYLQMNSLRAEDTAVYYCARDPLPLHYYGMDVWGQGTTVTVSS

SEQ ID NO: 151 - protein, 8 aa, Artificial Sequence
  vhCDR1
GFTFSSYA

SEQ ID NO: 152 - protein, 8 aa, Artificial Sequence
  vhCDR2
ISYDGTPV

SEQ ID NO: 153 - protein, 14 aa, Artificial Sequence
  vhCDR3
ARDPLPLHYYGMDV

SEQ ID NO: 154 - protein, 448 aa, Artificial Sequence
  Full length HC (IgG4(S241P))
EVQLVETGGGLIQPGRSLRLSCAASGFTFSSYAMHWVRQAPGKGLEWVAVISYDGTPVYYADSVKGRFTISRDNSKNTLYLQMNSLRAEDTAVYYCARDPLPLHYYGMDVWGQGTTVTVSSASTKGPSVFPLAPCSRSTSESTAALGCLVKDYFPEPVTVSWNSGALTSGVHTFPAVLQSSGLYSLSSVVTVPSSSLGTKTYTCNVDHKPSNTKVDKRVESKYGPPCPPCPAPEFLGGPSVFLFPPKPKDTLMISRTPEVTCVVVDVSQEDPEVQFNWYVDGVEVHNAKTKPREEQFNSTYRVVSVLTVLHQDWLNGKEYKCKVSNKGLPSSIEKTISKAKGQPREPQVYTLPPSQEEMTKNQVSLTCLVKGFYPSDIAVEWESNGQPENNYKTTPPVLDSDGSFFLYSRLTVDKSRWQEGNVFSCSVMHEALHNHYTQKSLSLSPGK

SEQ ID NO: 155 - protein, 111 aa, Artificial Sequence
  Variable light (vl) domain
QSALTQPRSASGNPGQRVTISCSGSSSNMGRRPVNWYQQIPGTAPKLLIYSQNQRPSGVPDRFSGSQSGTSASLTISGLQSEDEAEYFCAVWDGDRRSLQLGGGTQLAVLG

SEQ ID NO: 156 - protein, 8 aa, Artificial Sequence
  vlCDR1
SSNMGRRP

SEQ ID NO: 157 - protein, 3 aa, Artificial Sequence
  vlCDR2
SQN

SEQ ID NO: 158 - protein, 11 aa, Artificial Sequence
  vlCDR3
AVWDGDRRSLQ

SEQ ID NO: 159 - protein, 216 aa, Artificial Sequence
  Full length light chain
QSALTQPRSASGNPGQRVTISCSGSSSNMGRRPVNWYQQIPGTAPKLLIYSQNQRPSGVPDRFSGSQSGTSASLTISGLQSEDEAEYFCAVWDGDRRSLQLGGGTQLAVLGQPKAAPSVTLFPPSSEELQANKATLVCLISDFYPGAVTVAWKADSSPVKAGVETTTPSKQSNNKYAASSYLSLTPEQWKSHRSYSCQVTHEGSTVEKTVAPTECS

SEQ ID NO: 160 - protein, 121 aa, Artificial Sequence
  CPA.9.086   Variable heavy (vh) domain
EVQLVETGGGLIQPGRSLRLSCAASGFTFSSYAMHWVRQAPGKGLEWVAVISYAGEVKYYADSVKGRFTISRDNSKNTLYLQMNSLRAEDTAVYYCARDPLPLHYYGMDVWGQGTTVTVSS

SEQ ID NO: 161 - protein, 8 aa, Artificial Sequence
  vhCDR1
GFTFSSYA

SEQ ID NO: 162 - protein, 8 aa, Artificial Sequence
  vhCDR2
ISYAGEVK

SEQ ID NO: 163 - protein, 14 aa, Artificial Sequence
  vhCDR3
ARDPLPLHYYGMDV

SEQ ID NO: 164 - protein, 448 aa, Artificial Sequence
  Full length HC (IgG4(S241P))
EVQLVETGGGLIQPGRSLRLSCAASGFTFSSYAMHWVRQAPGKGLEWVAVISYAGEVKYYADSVKGRFTISRDNSKNTLYLQMNSLRAEDTAVYYCARDPLPLHYYGMDVWGQGTTVTVSSASTKGPSVFPLAPCSRSTSESTAALGCLVKDYFPEPVTVSWNSGALTSGVHTFPAVLQSSGLYSLSSVVTVPSSSLGTKTYTCNVDHKPSNTKVDKRVESKYGPPCPPCPAPEFLGGPSVFLFPPKPKDTLMISRTPEVTCVVVDVSQEDPEVQFNWYVDGVEVHNAKTKPREEQFNSTYRVVSVLTVLHQDWLNGKEYKCKVSNKGLPSSIEKTISKAKGQPREPQVYTLPPSQEEMTKNQVSLTCLVKGFYPSDIAVEWESNGQPENNYKTTPPVLDSDGSFFLYSRLTVDKSRWQEGNVFSCSVMHEALHNHYTQKSLSLSPGK

SEQ ID NO: 165 - protein, 111 aa, Artificial Sequence
  Variable light (vl) domain
QSALTQPRSASGNPGQRVTISCSGSSSNMGRRPVNWYQQIPGTAPKLLIYSQNQRPSGVPDRFSGSQSGTSASLTISGLQSEDEAEYFCAVWDDIGRVLQLGGGTQLAVLG

SEQ ID NO: 166 - protein, 8 aa, Artificial Sequence
  vlCDR1
SSNMGRRP

SEQ ID NO: 167 - protein, 3 aa, Artificial Sequence
  vlCDR2
SQN

SEQ ID NO: 168 - protein, 11 aa, Artificial Sequence
  vlCDR3
AVWDDIGRVLQ

SEQ ID NO: 169 - protein, 216 aa, Artificial Sequence
  Full length light chain
QSALTQPRSASGNPGQRVTISCSGSSSNMGRRPVNWYQQIPGTAPKLLIYSQNQRPSGVPDRFSGSQSGTSASLTISGLQSEDEAEYFCAVWDDIGRVLQLGGGTQLAVLGQPKAAPSVTLFPPSSEELQANKATLVCLISDFYPGAVTVAWKADSSPVKAGVETTTPSKQSNNKYAASSYLSLTPEQWKSHRSYSCQVTHEGSTVEKTVAPTECS

SEQ ID NO: 170 - protein, 121 aa, Artificial Sequence
  CPA.9.089 Variable heavy (vh) domain
EVQLVETGGGLIQPGRSLRLSCAASGFTFSSYAMHWVRQAPGKGLEWVAVISYDRTPVYYADSVKGRFTISRDNSKNTLYLQMNSLRAEDTAVYYCARDPLPLHYYGMDVWGQGTTVTVSS

SEQ ID NO: 171 - protein, 8 aa, Artificial Sequence
  vhCDR1
GFTFSSYA

SEQ ID NO: 172 - protein, 8 aa, Artificial Sequence
  vhCDR2
ISYDRTPV

SEQ ID NO: 173 - protein, 14 aa, Artificial Sequence
  vhCDR3
ARDPLPLHYYGMDV

SEQ ID NO: 174 - protein, 448 aa, Artificial Sequence
  Full length HC (IgG4(S241P))
EVQLVETGGGLIQPGRSLRLSCAASGFTFSSYAMHWVRQAPGKGLEWVAVISYDRTPVYYADSVKGRFTISRDNSKNTLYLQMNSLRAEDTAVYYCARDPLPLHYYGMDVWGQGTTVTVSSASTKGPSVFPLAPCSRSTSESTAALGCLVKDYFPEPVTVSWNSGALTSGVHTFPAVLQSSGLYSLSSVVTVPSSSLGTKTYTCNVDHKPSNTKVDKRVESKYGPPCPPCPAPEFLGGPSVFLFPPKPKDTLMISRTPEVTCVVVDVSQEDPEVQFNWYVDGVEVHNAKTKPREEQFNSTYRVVSVLTVLHQDWLNGKEYKCKVSNKGLPSSIEKTISKAKGQPREPQVYTLPPSQEEMTKNQVSLTCLVKGFYPSDIAVEWESNGQPENNYKTTPPVLDSDGSFFLYSRLTVDKSRWQEGNVFSCSVMHEALHNHYTQKSLSLSPGK

SEQ ID NO: 175 - protein, 111 aa, Artificial Sequence
  Variable light (vl) domain
QSALTQPRSASGNPGQRVTISCSGSSSNMGRRPVNWYQQIPGTAPKLLIYSQNQRPSGVPDRFSGSQSGTSASLTISGLQSEDEAEYFCATWDDSLPRLNFGGGTKLAVLG

SEQ ID NO: 176 - protein, 8 aa, Artificial Sequence
  vlCDR1
SSNMGRRP

SEQ ID NO: 177 - protein, 3 aa, Artificial Sequence
  vlCDR2
SQN

SEQ ID NO: 178 - protein, 11 aa, Artificial Sequence
  vlCDR3
ATWDDSLPRLN

SEQ ID NO: 179 - protein, 216 aa, Artificial Sequence
  Full length light chain
QSALTQPRSASGNPGQRVTISCSGSSSNMGRRPVNWYQQIPGTAPKLLIYSQNQRPSGVPDRFSGSQSGTSASLTISGLQSEDEAEYFCATWDDSLPRLNFGGGTKLAVLGQPKAAPSVTLFPPSSEELQANKATLVCLISDFYPGAVTVAWKADSSPVKAGVETTTPSKQSNNKYAASSYLSLTPEQWKSHRSYSCQVTHEGSTVEKTVAPTECS

SEQ ID NO: 180 - protein, 121 aa, Artificial Sequence
  CPA.9.093 Variable heavy (vh) domain
EVQLVETGGGLIQPGRSLRLSCAASGFTFSSYAMHWVRQAPGKGLEWVAVISYEGDRKYYADSVKGRFTISRDNSKNTLYLQMNSLRAEDTAVYYCARDPLPLHYYGMDVWGQGTTVTVSS

SEQ ID NO: 181 - protein, 8 aa, Artificial Sequence
  vhCDR1
GFTFSSYA

SEQ ID NO: 182 - protein, 8 aa, Artificial Sequence
  vhCDR2
ISYEGDRK

SEQ ID NO: 183 - protein, 14 aa, Artificial Sequence
  vhCDR3
ARDPLPLHYYGMDV

SEQ ID NO: 184 - protein, 448 aa, Artificial Sequence
  Full length HC (IgG4(S241P))
EVQLVETGGGLIQPGRSLRLSCAASGFTFSSYAMHWVRQAPGKGLEWVAVISYEGDRKYYADSVKGRFTISRDNSKNTLYLQMNSLRAEDTAVYYCARDPLPLHYYGMDVWGQGTTVTVSSASTKGPSVFPLAPCSRSTSESTAALGCLVKDYFPEPVTVSWNSGALTSGVHTFPAVLQSSGLYSLSSVVTVPSSSLGTKTYTCNVDHKPSNTKVDKRVESKYGPPCPPCPAPEFLGGPSVFLFPPKPKDTLMISRTPEVTCVVVDVSQEDPEVQFNWYVDGVEVHNAKTKPREEQFNSTYRVVSVLTVLHQDWLNGKEYKCKVSNKGLPSSIEKTISKAKGQPREPQVYTLPPSQEEMTKNQVSLTCLVKGFYPSDIAVEWESNGQPENNYKTTPPVLDSDGSFFLYSRLTVDKSRWQEGNVFSCSVMHEALHNHYTQKSLSLSPGK

SEQ ID NO: 185 - protein, 111 aa, Artificial Sequence
  Variable light (vl) domain
QSALTQPRSASGNPGQRVTISCSGSSSNMGRRPVNWYQQIPGTAPKLLIYSQNQRPSGVPDRFSGSQSGTSASLTISGLQSEDEAEYFCATWDDSTPHGVFGGGTKLAVLG

SEQ ID NO: 186 - protein, 8 aa, Artificial Sequence
  vlCDR1
SSNMGRRP

SEQ ID NO: 187 - protein, 3 aa, Artificial Sequence
  vlCDR2
SQN

SEQ ID NO: 188 - protein, 11 aa, Artificial Sequence
  vlCDR3
ATWDDSTPHGV

SEQ ID NO: 189 - protein, 216 aa, Artificial Sequence
  Full length light chain
QSALTQPRSASGNPGQRVTISCSGSSSNMGRRPVNWYQQIPGTAPKLLIYSQNQRPSGVPDRFSGSQSGTSASLTISGLQSEDEAEYFCATWDDSTPHGVFGGGTKLAVLGQPKAAPSVTLFPPSSEELQANKATLVCLISDFYPGAVTVAWKADSSPVKAGVETTTPSKQSNNKYAASSYLSLTPEQWKSHRSYSCQVTHEGSTVEKTVAPTECS

SEQ ID NO: 190 - protein, 118 aa, Artificial Sequence
  CPA.9.101  Variable heavy (vh) domain
EVQLVETGGGLIQPGGSLRLSCAASGFTVSSNYMSWVRQAPGKGLEWVSVIYSGGSTYYADSVKGRFTISRDNSKNTLYLQMNSLRAEDTAVYYCARGAPLFGQYPYWGQGTLVTVSS

SEQ ID NO: 191 - protein, 8 aa, Artificial Sequence
  vhCDR1
GFTVSSNY

SEQ ID NO: 192 - protein, 7 aa, Artificial Sequence
  vhCDR2
IYSGGST

SEQ ID NO: 193 - protein, 12 aa, Artificial Sequence
  vhCDR3
ARGAPLFGQYPY

SEQ ID NO: 194 - protein, 445 aa, Artificial Sequence
  Full length HC (IgG4(S241P))
EVQLVETGGGLIQPGGSLRLSCAASGFTVSSNYMSWVRQAPGKGLEWVSVIYSGGSTYYADSVKGRFTISRDNSKNTLYLQMNSLRAEDTAVYYCARGAPLFGQYPYWGQGTLVTVSSASTKGPSVFPLAPCSRSTSESTAALGCLVKDYFPEPVTVSWNSGALTSGVHTFPAVLQSSGLYSLSSVVTVPSSSLGTKTYTCNVDHKPSNTKVDKRVESKYGPPCPPCPAPEFLGGPSVFLFPPKPKDTLMISRTPEVTCVVVDVSQEDPEVQFNWYVDGVEVHNAKTKPREEQFNSTYRVVSVLTVLHQDWLNGKEYKCKVSNKGLPSSIEKTISKAKGQPREPQVYTLPPSQEEMTKNQVSLTCLVKGFYPSDIAVEWESNGQPENNYKTTPPVLDSDGSFFLYSRLTVDKSRWQEGNVFSCSVMHEALHNHYTQKSLSLSPGK

SEQ ID NO: 195 - protein, 109 aa, Artificial Sequence
  Variable light (vl) domain
DIQMTQSPSSLSASVGDRVTITCRASHAIASLFSWYQQKPGKAPKLLIYAASTLQTGVPSRFSGSASGTEFTLTISSLQPEDFATYYCLQLDSFPTWTFGQGTKVEIKR

SEQ ID NO: 196 - protein, 6 aa, Artificial Sequence
  vlCDR1
HAIASL

SEQ ID NO: 197 - protein, 3 aa, Artificial Sequence
  vlCDR2
AAS

SEQ ID NO: 198 - protein, 10 aa, Artificial Sequence
  vlCDR3
LQLDSFPTWT

SEQ ID NO: 199 - protein, 215 aa, Artificial Sequence
  Full length light chain
DIQMTQSPSSLSASVGDRVTITCRASHAIASLFSWYQQKPGKAPKLLIYAASTLQTGVPSRFSGSASGTEFTLTISSLQPEDFATYYCLQLDSFPTWTFGQGTKVEIKRTVAAPSVFIFPPSDEQLKSGTASVVCLLNNFYPREAKVQWKVDNALQSGNSQESVTEQDSKDSTYSLSSTLTLSKADYEKHKVYACEVTHQGLSSPVTKSFNRGEC

SEQ ID NO: 200 - protein, 118 aa, Artificial Sequence
  CPA.9.103 Variable heavy (vh) domain
EVQLVETGGGLIQPGGSLRLSCAASGFTVSSNYMSWVRQAPGKGLEWVSVIYSGGSTYYADSVKGRFTISRDNSKNTLYLQMNSLRAEDTAVYYCARGARPNGQYPYWGQGTLVTVSS

SEQ ID NO: 201 - protein, 8 aa, Artificial Sequence
  vhCDR1
GFTVSSNY

SEQ ID NO: 202 - protein, 7 aa, Artificial Sequence
  vhCDR2
IYSGGST

SEQ ID NO: 203 - protein, 12 aa, Artificial Sequence
  vhCDR3
ARGARPNGQYPY

SEQ ID NO: 204 - protein, 445 aa, Artificial Sequence
  Full length HC (IgG4(S241P))
EVQLVETGGGLIQPGGSLRLSCAASGFTVSSNYMSWVRQAPGKGLEWVSVIYSGGSTYYADSVKGRFTISRDNSKNTLYLQMNSLRAEDTAVYYCARGARPNGQYPYWGQGTLVTVSSASTKGPSVFPLAPCSRSTSESTAALGCLVKDYFPEPVTVSWNSGALTSGVHTFPAVLQSSGLYSLSSVVTVPSSSLGTKTYTCNVDHKPSNTKVDKRVESKYGPPCPPCPAPEFLGGPSVFLFPPKPKDTLMISRTPEVTCVVVDVSQEDPEVQFNWYVDGVEVHNAKTKPREEQFNSTYRVVSVLTVLHQDWLNGKEYKCKVSNKGLPSSIEKTISKAKGQPREPQVYTLPPSQEEMTKNQVSLTCLVKGFYPSDIAVEWESNGQPENNYKTTPPVLDSDGSFFLYSRLTVDKSRWQEGNVFSCSVMHEALHNHYTQKSLSLSPGK

SEQ ID NO: 205 - protein, 109 aa, Artificial Sequence
  Variable light (vl) domain
DIQLTQSPSFLSASVGDRVTITCRASHGIKSLFSWYQQKPGKAPKLLIYAASTLQTGVPSRFSGSASGTEFTLTISSLQPEDFATYYCLQLDSFPTWTFGQGTKVEIKR

SEQ ID NO: 206 - protein, 6 aa, Artificial Sequence
  vlCDR1
HGIKSL

SEQ ID NO: 207 - protein, 3 aa, Artificial Sequence
  vlCDR2
AAS

SEQ ID NO: 208 - protein, 10 aa, Artificial Sequence
  vlCDR3
LQLDSFPTWT

SEQ ID NO: 209 - protein, 215 aa, Artificial Sequence
  Full length light chain
DIQLTQSPSFLSASVGDRVTITCRASHGIKSLFSWYQQKPGKAPKLLIYAASTLQTGVPSRFSGSASGTEFTLTISSLQPEDFATYYCLQLDSFPTWTFGQGTKVEIKRTVAAPSVFIFPPSDEQLKSGTASVVCLLNNFYPREAKVQWKVDNALQSGNSQESVTEQDSKDSTYSLSSTLTLSKADYEKHKVYACEVTHQGLSSPVTKSFNRGEC

SEQ ID NO: 210 - protein, 119 aa, Artificial Sequence
  Clone 31C6 Variable heavy (vh) domain
EVQLQQSGPELVKPGSSVKMSCKASGYTFSSYVMHWVKQKPGQGLEWIGYIDPYNDGAKYNEKFKGKATLTSDKSSSTAYMELSSLTSEDSAVYYCARGGPYGWYFDVWGAGTTVTVSS

SEQ ID NO: 211 - protein, 8 aa, Artificial Sequence
  vhCDR1
GYTFSSYV

SEQ ID NO: 212 - protein, 8 aa, Artificial Sequence
  vhCDR2
IDPYNDGA

SEQ ID NO: 213 - protein, 12 aa, Artificial Sequence
  vhCDR3
ARGGPYGWYFDV

SEQ ID NO: 214 - protein, 446 aa, Artificial Sequence
  Full length HC (IgG4(S241P))
EVQLQQSGPELVKPGSSVKMSCKASGYTFSSYVMHWVKQKPGQGLEWIGYIDPYNDGAKYNEKFKGKATLTSDKSSSTAYMELSSLTSEDSAVYYCARGGPYGWYFDVWGAGTTVTVSSASTKGPSVFPLAPCSRSTSESTAALGCLVKDYFPEPVTVSWNSGALTSGVHTFPAVLQSSGLYSLSSVVTVPSSSLGTKTYTCNVDHKPSNTKVDKRVESKYGPPCPPCPAPEFLGGPSVFLFPPKPKDTLMISRTPEVTCVVVDVSQEDPEVQFNWYVDGVEVHNAKTKPREEQFNSTYRVVSVLTVLHQDWLNGKEYKCKVSNKGLPSSIEKTISKAKGQPREPQVYTLPPSQEEMTKNQVSLTCLVKGFYPSDIAVEWESNGQPENNYKTTPPVLDSDGSFFLYSRLTVDKSRWQEGNVFSCSVMHEALHNHYTQKSLSLSPGK

SEQ ID NO: 215 - protein, 107 aa, Artificial Sequence
  Variable light (vl) domain
DIQMTQSPASLSASVGETVTITCRASEHIYSYLSWYQQKQGKSPQLLVYNAKTLAEGVPSRFSGSGSGTQFSLKINSLQPEDFGTYYCQHHFGSPLTFGAGTTLELK

SEQ ID NO: 216 - protein, 6 aa, Artificial Sequence
  vlCDR1
EHIYSY

SEQ ID NO: 217 - protein, 3 aa, Artificial Sequence
  vlCDR2
NAK

SEQ ID NO: 218 - protein, 9 aa, Artificial Sequence
  vlCDR3
QHHFGSPLT

SEQ ID NO: 219 - protein, 214 aa, Artificial Sequence
  Full length light chain
DIQMTQSPASLSASVGETVTITCRASEHIYSYLSWYQQKQGKSPQLLVYNAKTLAEGVPSRFSGSGSGTQFSLKINSLQPEDFGTYYCQHHFGSPLTFGAGTTLELKRTVAAPSVFIFPPSDEQLKSGTASVVCLLNNFYPREAKVQWKVDNALQSGNSQESVTEQDSKDSTYSLSSTLTLSKADYEKHKVYACEVTHQGLSSPVTKSFNRGEC

SEQ ID NO: 220 - protein, 130 aa, Artificial Sequence
  Clone 22G2 Variable heavy (vh) domain
QVHLQESGPGLVKPSETLSLTCTVSGGSVSSGIYYWSWIRQPPGKGLEWIGYIYYSGSTNYNPSLKSRVTISVDTSKNQFSLKLSSVTAADTAVYYCARDYYVSGNYYNVDYYFFGVDVWGQGTTVTVSS

SEQ ID NO: 221 - protein, 10 aa, Artificial Sequence
  vhCDR1
GGSVSSGIYY

SEQ ID NO: 222 - protein, 7 aa, Artificial Sequence
  vhCDR2
IYYSGST

SEQ ID NO: 223 - protein, 22 aa, Artificial Sequence
  vhCDR3
ARDYYVSGNYYNVDYYFFGVDV

SEQ ID NO: 224 - protein, 457 aa, Artificial Sequence
  Full length HC (IgG4(S241P))
QVHLQESGPGLVKPSETLSLTCTVSGGSVSSGIYYWSWIRQPPGKGLEWIGYIYYSGSTNYNPSLKSRVTISVDTSKNQFSLKLSSVTAADTAVYYCARDYYVSGNYYNVDYYFFGVDVWGQGTTVTVSSASTKGPSVFPLAPCSRSTSESTAALGCLVKDYFPEPVTVSWNSGALTSGVHTFPAVLQSSGLYSLSSVVTVPSSSLGTKTYTCNVDHKPSNTKVDKRVESKYGPPCPPCPAPEFLGGPSVFLFPPKPKDTLMISRTPEVTCVVVDVSQEDPEVQFNWYVDGVEVHNAKTKPREEQFNSTYRVVSVLTVLHQDWLNGKEYKCKVSNKGLPSSIEKTISKAKGQPREPQVYTLPPSQEEMTKNQVSLTCLVKGFYPSDIAVEWESNGQPENNYKTTPPVLDSDGSFFLYSRLTVDKSRWQEGNVFSCSVMHEALHNHYTQKSLSLSPGK

SEQ ID NO: 225 - protein, 109 aa, Artificial Sequence
  Variable light (vl) domain
EIVLTQSPATLSLSPGERATLSCRASQSVSSYLAWYQQKPGQAPRLLIYDASNRATGIPARFSGSGSGTDFTLTISSLEPEDFAVYYCQQRSNWPPLFTFGPGTKVDIK

SEQ ID NO: 226 - protein, 6 aa, Artificial Sequence
  vlCDR1
QSVSSY

SEQ ID NO: 227 - protein, 3 aa, Artificial Sequence
  vlCDR2
DAS

SEQ ID NO: 228 - protein, 11 aa, Artificial Sequence
  vlCDR3
QQRSNWPPLFT

SEQ ID NO: 229 - protein, 216 aa, Artificial Sequence
  Full length light chain
EIVLTQSPATLSLSPGERATLSCRASQSVSSYLAWYQQKPGQAPRLLIYDASNRATGIPARFSGSGSGTDFTLTISSLEPEDFAVYYCQQRSNWPPLFTFGPGTKVDIKRTVAAPSVFIFPPSDEQLKSGTASVVCLLNNFYPREAKVQWKVDNALQSGNSQESVTEQDSKDSTYSLSSTLTLSKADYEKHKVYACEVTHQGLSSPVTKSFNRGEC

SEQ ID NO: 230 - protein, 119 aa, Artificial Sequence
  CHA.9.536.1 Variable heavy (vh) domain
QVQLVQSGAEVKKPGASVKVSCKASGYTFTEYTLHWVRQAPGQGLEWMGGINPNNGGTSYAQKFQGRVTMTRDTSTSTVYMELSSLRSEDTAVYYCARSGYYDYSFAYWGQGTLVTVSS

SEQ ID NO: 231 - protein, 10 aa, Artificial Sequence
  vhCDR1
GYTFTEYTLH

SEQ ID NO: 232 - protein, 10 aa, Artificial Sequence
  vhCDR2
GINPNNGGTS

SEQ ID NO: 233 - protein, 10 aa, Artificial Sequence
  vhCDR3
SGYYDYSFAY

SEQ ID NO: 234 - protein, 446 aa, Artificial Sequence
  Full length HC (IgG4(S241P))
QVQLVQSGAEVKKPGASVKVSCKASGYTFTEYTLHWVRQAPGQGLEWMGGINPNNGGTSYAQKFQGRVTMTRDTSTSTVYMELSSLRSEDTAVYYCARSGYYDYSFAYWGQGTLVTVSSASTKGPSVFPLAPCSRSTSESTAALGCLVKDYFPEPVTVSWNSGALTSGVHTFPAVLQSSGLYSLSSVVTVPSSSLGTKTYTCNVDHKPSNTKVDKRVESKYGPPCPPCPAPEFLGGPSVFLFPPKPKDTLMISRTPEVTCVVVDVSQEDPEVQFNWYVDGVEVHNAKTKPREEQFNSTYRVVSVLTVLHQDWLNGKEYKCKVSNKGLPSSIEKTISKAKGQPREPQVYTLPPSQEEMTKNQVSLTCLVKGFYPSDIAVEWESNGQPENNYKTTPPVLDSDGSFFLYSRLTVDKSRWQEGNVFSCSVMHEALHNHYTQKSLSLSPGK

SEQ ID NO: 235 - protein, 107 aa, Artificial Sequence
  Variable light (vl) domain
DIQMTQSPSSLSASVGDRVTITCRASQDVKNAVVWYQQKPGKAPKLLIYSPSYRYTGVPSRFSGSGSGTDFTLTISSLQPEDFATYYCQQHYSTPFTFGQGTKLEIK

SEQ ID NO: 236 - protein, 11 aa, Artificial Sequence
  vlCDR1
RASQDVKNAVV

SEQ ID NO: 237 - protein, 7 aa, Artificial Sequence
  vlCDR2
SPSYRYT

SEQ ID NO: 238 - protein, 9 aa, Artificial Sequence
  vlCDR3
QQHYSTPFT

SEQ ID NO: 239 - protein, 214 aa, Artificial Sequence
  Full length light chain
DIQMTQSPSSLSASVGDRVTITCRASQDVKNAVVWYQQKPGKAPKLLIYSPSYRYTGVPSRFSGSGSGTDFTLTISSLQPEDFATYYCQQHYSTPFTFGQGTKLEIKRTVAAPSVFIFPPSDEQLKSGTASVVCLLNNFYPREAKVQWKVDNALQSGNSQESVTEQDSKDSTYSLSSTLTLSKADYEKHKVYACEVTHQGLSSPVTKSFNRGEC

SEQ ID NO: 240 - protein, 119 aa, Artificial Sequence
  CHA.9.536.3 Variable heavy (vh) domain
QVQLVQSGAEVKKPGASVKVSCKTSGYTFTEYTLHWVRQAPGQGLEWIGGINPNNGGTSYAQKFQGRVTMTVDTSTSTVYMELSSLRSEDTAVYYCAGSGYYDYSFAYWGQGTLVTVSS

SEQ ID NO: 241 - protein, 10 aa, Artificial Sequence
  vhCDR1
GYTFTEYTLH

SEQ ID NO: 242 - protein, 10 aa, Artificial Sequence
  vhCDR2
GINPNNGGTS

SEQ ID NO: 243 - protein, 10 aa, Artificial Sequence
  vhCDR3
SGYYDYSFAY

SEQ ID NO: 244 - protein, 446 aa, Artificial Sequence
  Full length HC (IgG4(S241P))
QVQLVQSGAEVKKPGASVKVSCKTSGYTFTEYTLHWVRQAPGQGLEWIGGINPNNGGTSYAQKFQGRVTMTVDTSTSTVYMELSSLRSEDTAVYYCAGSGYYDYSFAYWGQGTLVTVSSASTKGPSVFPLAPCSRSTSESTAALGCLVKDYFPEPVTVSWNSGALTSGVHTFPAVLQSSGLYSLSSVVTVPSSSLGTKTYTCNVDHKPSNTKVDKRVESKYGPPCPPCPAPEFLGGPSVFLFPPKPKDTLMISRTPEVTCVVVDVSQEDPEVQFNWYVDGVEVHNAKTKPREEQFNSTYRVVSVLTVLHQDWLNGKEYKCKVSNKGLPSSIEKTISKAKGQPREPQVYTLPPSQEEMTKNQVSLTCLVKGFYPSDIAVEWESNGQPENNYKTTPPVLDSDGSFFLYSRLTVDKSRWQEGNVFSCSVMHEALHNHYTQKSLSLSPGK

SEQ ID NO: 245 - protein, 107 aa, Artificial Sequence; identical to SEQ ID NO: 235
  Variable light (vl) domain

SEQ ID NO: 246 - protein, 11 aa, Artificial Sequence
  vlCDR1
RASQDVKNAVV

SEQ ID NO: 247 - protein, 7 aa, Artificial Sequence
  vlCDR2
SPSYRYT

SEQ ID NO: 248 - protein, 9 aa, Artificial Sequence
  vlCDR3
QQHYSTPFT

SEQ ID NO: 249 - protein, 214 aa, Artificial Sequence; identical to SEQ ID NO: 239
  Full length light chain

SEQ ID NO: 250 - protein, 119 aa, Artificial Sequence; identical to SEQ ID NO: 240
  CHA.9.536.4 Variable heavy (vh) domain

SEQ ID NO: 251 - protein, 10 aa, Artificial Sequence
  vhCDR1
GYTFTEYTLH

SEQ ID NO: 252 - protein, 10 aa, Artificial Sequence
  vhCDR2
GINPNNGGTS

SEQ ID NO: 253 - protein, 10 aa, Artificial Sequence
  vhCDR3
SGYYDYSFAY

SEQ ID NO: 254 - protein, 446 aa, Artificial Sequence; identical to SEQ ID NO: 244
  Full length HC (IgG4(S241P))

SEQ ID NO: 255 - protein, 107 aa, Artificial Sequence
  Variable light (vl) domain
DIQMTQSPSSLSASVGDRVTITCRASQDVKNAVVWYQQKPGKAPKLLIYSPSYRYTGVPSRFSGSGSGTDFTFTISSVQPEDFATYYCQQHYSTPFTFGQGTKLEIK

SEQ ID NO: 256 - protein, 11 aa, Artificial Sequence
  vlCDR1
RASQDVKNAVV

SEQ ID NO: 257 - protein, 7 aa, Artificial Sequence
  vlCDR2
SPSYRYT

SEQ ID NO: 258 - protein, 9 aa, Artificial Sequence
  vlCDR3
QQHYSTPFT

SEQ ID NO: 259 - protein, 214 aa, Artificial Sequence
  Full length light chain
DIQMTQSPSSLSASVGDRVTITCRASQDVKNAVVWYQQKPGKAPKLLIYSPSYRYTGVPSRFSGSGSGTDFTFTISSVQPEDFATYYCQQHYSTPFTFGQGTKLEIKRTVAAPSVFIFPPSDEQLKSGTASVVCLLNNFYPREAKVQWKVDNALQSGNSQESVTEQDSKDSTYSLSSTLTLSKADYEKHKVYACEVTHQGLSSPVTKSFNRGEC

SEQ ID NO: 260 - protein, 119 aa, Artificial Sequence
  CHA.9.536.5 Variable heavy (vh) domain
QVQLVQSGAEVKKPGASVKISCKTSGYTFTEYTLHWVRQAPGQGLEWIGGINPNNGGTSYAQKFQGRATLTVDTSTSTAYMELSSLRSEDTAVYYCAGSGYYDYSFAYWGQGTLVTVSS

SEQ ID NO: 261 - protein, 10 aa, Artificial Sequence
  vhCDR1
GYTFTEYTLH

SEQ ID NO: 262 - protein, 10 aa, Artificial Sequence
  vhCDR2
GINPNNGGTS

SEQ ID NO: 263 - protein, 10 aa, Artificial Sequence
  vhCDR3
SGYYDYSFAY

SEQ ID NO: 264 - protein, 446 aa, Artificial Sequence
  Full length HC (IgG4(S241P))
QVQLVQSGAEVKKPGASVKISCKTSGYTFTEYTLHWVRQAPGQGLEWIGGINPNNGGTSYAQKFQGRATLTVDTSTSTAYMELSSLRSEDTAVYYCAGSGYYDYSFAYWGQGTLVTVSSASTKGPSVFPLAPCSRSTSESTAALGCLVKDYFPEPVTVSWNSGALTSGVHTFPAVLQSSGLYSLSSVVTVPSSSLGTKTYTCNVDHKPSNTKVDKRVESKYGPPCPPCPAPEFLGGPSVFLFPPKPKDTLMISRTPEVTCVVVDVSQEDPEVQFNWYVDGVEVHNAKTKPREEQFNSTYRVVSVLTVLHQDWLNGKEYKCKVSNKGLPSSIEKTISKAKGQPREPQVYTLPPSQEEMTKNQVSLTCLVKGFYPSDIAVEWESNGQPENNYKTTPPVLDSDGSFFLYSRLTVDKSRWQEGNVFSCSVMHEALHNHYTQKSLSLSPGK

SEQ ID NO: 265 - protein, 107 aa, Artificial Sequence; identical to SEQ ID NO: 235
  Variable light (vl) domain

SEQ ID NO: 266 - protein, 11 aa, Artificial Sequence
  vlCDR1
RASQDVKNAVV

SEQ ID NO: 267 - protein, 7 aa, Artificial Sequence
  vlCDR2
SPSYRYT

SEQ ID NO: 268 - protein, 9 aa, Artificial Sequence
  vlCDR3
QQHYSTPFT

SEQ ID NO: 269 - protein, 214 aa, Artificial Sequence; identical to SEQ ID NO: 239
  Full length light chain

SEQ ID NO: 270 - protein, 119 aa, Artificial Sequence; identical to SEQ ID NO: 260
  CHA.9.536.6 Variable heavy (vh) domain

SEQ ID NO: 271 - protein, 10 aa, Artificial Sequence
  vhCDR1
GYTFTEYTLH

SEQ ID NO: 272 - protein, 10 aa, Artificial Sequence
  vhCDR2
GINPNNGGTS

SEQ ID NO: 273 - protein, 10 aa, Artificial Sequence
  vhCDR3
SGYYDYSFAY

SEQ ID NO: 274 - protein, 446 aa, Artificial Sequence; identical to SEQ ID NO: 264
  Full length HC (IgG4(S241P))

SEQ ID NO: 275 - protein, 107 aa, Artificial Sequence; identical to SEQ ID NO: 255
  Variable light (vl) domain

SEQ ID NO: 276 - protein, 11 aa, Artificial Sequence
  vlCDR1
RASQDVKNAVV

SEQ ID NO: 277 - protein, 7 aa, Artificial Sequence
  vlCDR2
SPSYRYT

SEQ ID NO: 278 - protein, 9 aa, Artificial Sequence
  vlCDR3
QQHYSTPFT

SEQ ID NO: 279 - protein, 214 aa, Artificial Sequence; identical to SEQ ID NO: 259
  Full length light chain

SEQ ID NO: 280 - protein, 119 aa, Artificial Sequence
  CHA.9.536.7 Variable heavy (vh) domain
QVQLVQSGAEVKKPGASVKISCKTSGYTFTEYTLHWVRQAPGQGLEWIGGINPNNGGTSYAQKFQGRATLTVDKSTSTAYMELSSLRSEDTAVYYCAGSGYYDYSFAYWGQGTLVTVSS

SEQ ID NO: 281 - protein, 10 aa, Artificial Sequence
  vhCDR1
GYTFTEYTLH

SEQ ID NO: 282 - protein, 10 aa, Artificial Sequence
  vhCDR2
GINPNNGGTS

SEQ ID NO: 283 - protein, 10 aa, Artificial Sequence
  vhCDR3
SGYYDYSFAY

SEQ ID NO: 284 - protein, 446 aa, Artificial Sequence
  Full length HC (IgG4(S241P))
QVQLVQSGAEVKKPGASVKISCKTSGYTFTEYTLHWVRQAPGQGLEWIGGINPNNGGTSYAQKFQGRATLTVDKSTSTAYMELSSLRSEDTAVYYCAGSGYYDYSFAYWGQGTLVTVSSASTKGPSVFPLAPCSRSTSESTAALGCLVKDYFPEPVTVSWNSGALTSGVHTFPAVLQSSGLYSLSSVVTVPSSSLGTKTYTCNVDHKPSNTKVDKRVESKYGPPCPPCPAPEFLGGPSVFLFPPKPKDTLMISRTPEVTCVVVDVSQEDPEVQFNWYVDGVEVHNAKTKPREEQFNSTYRVVSVLTVLHQDWLNGKEYKCKVSNKGLPSSIEKTISKAKGQPREPQVYTLPPSQEEMTKNQVSLTCLVKGFYPSDIAVEWESNGQPENNYKTTPPVLDSDGSFFLYSRLTVDKSRWQEGNVFSCSVMHEALHNHYTQKSLSLSPGK

SEQ ID NO: 285 - protein, 107 aa, Artificial Sequence; identical to SEQ ID NO: 235
  Variable light (vl) domain

SEQ ID NO: 286 - protein, 11 aa, Artificial Sequence
  vlCDR1
RASQDVKNAVV

SEQ ID NO: 287 - protein, 7 aa, Artificial Sequence
  vlCDR2
SPSYRYT

SEQ ID NO: 288 - protein, 9 aa, Artificial Sequence
  vlCDR3
QQHYSTPFT

SEQ ID NO: 289 - protein, 214 aa, Artificial Sequence; identical to SEQ ID NO: 239
  Full length light chain

SEQ ID NO: 290 - protein, 119 aa, Artificial Sequence; identical to SEQ ID NO: 280
  CHA.9.536.8 Variable heavy (vh) domain

SEQ ID NO: 291 - protein, 10 aa, Artificial Sequence
  vhCDR1
GYTFTEYTLH

SEQ ID NO: 292 - protein, 10 aa, Artificial Sequence
  vhCDR2
GINPNNGGTS

SEQ ID NO: 293 - protein, 10 aa, Artificial Sequence
  vhCDR3
SGYYDYSFAY

SEQ ID NO: 294 - protein, 446 aa, Artificial Sequence; identical to SEQ ID NO: 284
  Full length HC (IgG4(S241P))

SEQ ID NO: 295 - protein, 107 aa, Artificial Sequence; identical to SEQ ID NO: 255
  Variable light (vl) domain

SEQ ID NO: 296 - protein, 11 aa, Artificial Sequence
  vlCDR1
RASQDVKNAVV

SEQ ID NO: 297 - protein, 7 aa, Artificial Sequence
  vlCDR2
SPSYRYT

SEQ ID NO: 298 - protein, 9 aa, Artificial Sequence
  vlCDR3
QQHYSTPFT

SEQ ID NO: 299 - protein, 214 aa, Artificial Sequence; identical to SEQ ID NO: 259
  Full length light chain

SEQ ID NO: 300 - protein, 119 aa, Artificial Sequence
  CHA.9.560.1 Variable heavy (vh) domain
QVQLVQSGAEVKKPGASVKVSCKASGYTFTNYGMNWVRQAPGQGLEWMGWINTYTGEPTYAQKFQGRVTMTRDTSTSTVYMELSSLRSEDTAVYYCARGNGYYVGMDYWGQGTLVTVSS

SEQ ID NO: 301 - protein, 10 aa, Artificial Sequence
  vhCDR1
GYTFTNYGMN

SEQ ID NO: 302 - protein, 10 aa, Artificial Sequence
  vhCDR2
WINTYTGEPT

SEQ ID NO: 303 - protein, 10 aa, Artificial Sequence
  vhCDR3
GNGYYVGMDY

SEQ ID NO: 304 - protein, 446 aa, Artificial Sequence
  Full length HC (IgG4(S241P))
QVQLVQSGAEVKKPGASVKVSCKASGYTFTNYGMNWVRQAPGQGLEWMGWINTYTGEPTYAQKFQGRVTMTRDTSTSTVYMELSSLRSEDTAVYYCARGNGYYVGMDYWGQGTLVTVSSASTKGPSVFPLAPCSRSTSESTAALGCLVKDYFPEPVTVSWNSGALTSGVHTFPAVLQSSGLYSLSSVVTVPSSSLGTKTYTCNVDHKPSNTKVDKRVESKYGPPCPPCPAPEFLGGPSVFLFPPKPKDTLMISRTPEVTCVVVDVSQEDPEVQFNWYVDGVEVHNAKTKPREEQFNSTYRVVSVLTVLHQDWLNGKEYKCKVSNKGLPSSIEKTISKAKGQPREPQVYTLPPSQEEMTKNQVSLTCLVKGFYPSDIAVEWESNGQPENNYKTTPPVLDSDGSFFLYSRLTVDKSRWQEGNVFSCSVMHEALHNHYTQKSLSLSPGK

SEQ ID NO: 305 - protein, 109 aa, Artificial Sequence
  Variable light (vl) domain
QAVVTQEPSLTVSPGGTVTLTCRSSTGAVTTSNHANWFQQKPGQAPRTLIYGTNGRGSWTPARFSGSLLGGKAALTLSGAQPEDEAEYYCALWFSNHWVFGGGTKLTVL

SEQ ID NO: 306 - protein, 14 aa, Artificial Sequence
  vlCDR1
RSSTGAVTTSNHAN

SEQ ID NO: 307 - protein, 7 aa, Artificial Sequence
  vlCDR2
GTNGRGS

SEQ ID NO: 308 - protein, 9 aa, Artificial Sequence
  vlCDR3
ALWFSNHWV

SEQ ID NO: 309 - protein, 214 aa, Artificial Sequence
  Full length light chain
QAVVTQEPSLTVSPGGTVTLTCRSSTGAVTTSNHANWFQQKPGQAPRTLIYGTNGRGSWTPARFSGSLLGGKAALTLSGAQPEDEAEYYCALWFSNHWVFGGGTKLTVLQPKAAPSVTLFPPSSEELQANKATLVCLISDFYPGAVTVAWKADSSPVKAGVETTTPSKQSNNKYAASSYLSLTPEQWKSHRSYSCQVTHEGSTVEKTVAPTECS

SEQ ID NO: 310 - protein, 119 aa, Artificial Sequence
  CHA.9.560.3 Variable heavy (vh) domain
QVQLVQSGAEVKKPGASVKVSCKASGYTFTNYGMNWVRQAPGQGLEWMGWINTYTGEPTYAQKFQGRVTMTLDTSTSTAYMELSSLRSEDTAVYYCSRGNGYYVGMDYWGQGTLVTVSS

SEQ ID NO: 311 - protein, 10 aa, Artificial Sequence
  vhCDR1
GYTFTNYGMN

SEQ ID NO: 312 - protein, 10 aa, Artificial Sequence
  vhCDR2
WINTYTGEPT

SEQ ID NO: 313 - protein, 10 aa, Artificial Sequence
  vhCDR3
GNGYYVGMDY

SEQ ID NO: 314 - protein, 446 aa, Artificial Sequence
  Full length HC (IgG4(S241P))
QVQLVQSGAEVKKPGASVKVSCKASGYTFTNYGMNWVRQAPGQGLEWMGWINTYTGEPTYAQKFQGRVTMTLDTSTSTAYMELSSLRSEDTAVYYCSRGNGYYVGMDYWGQGTLVTVSSASTKGPSVFPLAPCSRSTSESTAALGCLVKDYFPEPVTVSWNSGALTSGVHTFPAVLQSSGLYSLSSVVTVPSSSLGTKTYTCNVDHKPSNTKVDKRVESKYGPPCPPCPAPEFLGGPSVFLFPPKPKDTLMISRTPEVTCVVVDVSQEDPEVQFNWYVDGVEVHNAKTKPREEQFNSTYRVVSVLTVLHQDWLNGKEYKCKVSNKGLPSSIEKTISKAKGQPREPQVYTLPPSQEEMTKNQVSLTCLVKGFYPSDIAVEWESNGQPENNYKTTPPVLDSDGSFFLYSRLTVDKSRWQEGNVFSCSVMHEALHNHYTQKSLSLSPGK

SEQ ID NO: 315 - protein, 109 aa, Artificial Sequence
  Variable light (vl) domain
QAVVTQEPSLTVSPGGTVTLTCGSSTGAVTTSNHANWVQQKPGQAFRGLIRGTNGRGSWTPARFSGSLLGGKAALTISGAQPEDEAEYYCALWFSNHWVFGGGTKLTVL

SEQ ID NO: 316 - protein, 14 aa, Artificial Sequence
  vlCDR1
GSSTGAVTTSNHAN

SEQ ID NO: 317 - protein, 7 aa, Artificial Sequence
  vlCDR2
GTNGRGS

SEQ ID NO: 318 - protein, 9 aa, Artificial Sequence
  vlCDR3
ALWFSNHWV

SEQ ID NO: 319 - protein, 214 aa, Artificial Sequence
  Full length light chain
QAVVTQEPSLTVSPGGTVTLTCGSSTGAVTTSNHANWVQQKPGQAFRGLIRGTNGRGSWTPARFSGSLLGGKAALTISGAQPEDEAEYYCALWFSNHWVFGGGTKLTVLQPKAAPSVTLFPPSSEELQANKATLVCLISDFYPGAVTVAWKADSSPVKAGVETTTPSKQSNNKYAASSYLSLTPEQWKSHRSYSCQVTHEGSTVEKTVAPTECS

SEQ ID NO: 320 - protein, 119 aa, Artificial Sequence; identical to SEQ ID NO: 310
  CHA.9.560.4 Variable heavy (vh) domain

SEQ ID NO: 321 - protein, 10 aa, Artificial Sequence
  vhCDR1
GYTFTNYGMN

SEQ ID NO: 322 - protein, 10 aa, Artificial Sequence
  vhCDR2
WINTYTGEPT

SEQ ID NO: 323 - protein, 10 aa, Artificial Sequence
  vhCDR3
GNGYYVGMDY

SEQ ID NO: 324 - protein, 446 aa, Artificial Sequence; identical to SEQ ID NO: 314
  Full length HC (IgG4(S241P))

SEQ ID NO: 325 - protein, 109 aa, Artificial Sequence
  Variable light (vl) domain
QAVVTQEPSLTVSPGGTVTLTCGSSTGAVTTSNHANWVQQKPGQAFRGLIRGTNGRGSGVPARFSGSLLGGKAALTISGAQPEDEAEYYCALWFSNHWVFGGGTKLTVL

SEQ ID NO: 326 - protein, 14 aa, Artificial Sequence
  vlCDR1
GSSTGAVTTSNHAN

SEQ ID NO: 327 - protein, 7 aa, Artificial Sequence
  vlCDR2
GTNGRGS

SEQ ID NO: 328 - protein, 9 aa, Artificial Sequence
  vlCDR3
ALWFSNHWV

SEQ ID NO: 329 - protein, 214 aa, Artificial Sequence
  Full length light chain
QAVVTQEPSLTVSPGGTVTLTCGSSTGAVTTSNHANWVQQKPGQAFRGLIRGTNGRGSGVPARFSGSLLGGKAALTISGAQPEDEAEYYCALWFSNHWVFGGGTKLTVLQPKAAPSVTLFPPSSEELQANKATLVCLISDFYPGAVTVAWKADSSPVKAGVETTTPSKQSNNKYAASSYLSLTPEQWKSHRSYSCQVTHEGSTVEKTVAPTECS

SEQ ID NO: 330 - protein, 119 aa, Artificial Sequence
  CHA.9.560.5 Variable heavy (vh) domain
QVQLVQSGAEVKKPGASVKISCKASGYTFTNYGMNWVRQAPGQGLEWMGWINTYTGEPTYAQKFQGRFTFTLDTSTSTAYLEISSLRSEDTAVYYCSRGNGYYVGMDYWGQGTLVTVSS

SEQ ID NO: 331 - protein, 10 aa, Artificial Sequence
  vhCDR1
GYTFTNYGMN

SEQ ID NO: 332 - protein, 10 aa, Artificial Sequence
  vhCDR2
WINTYTGEPT

SEQ ID NO: 333 - protein, 10 aa, Artificial Sequence
  vhCDR3
GNGYYVGMDY

SEQ ID NO: 334 - protein, 446 aa, Artificial Sequence
  Full length HC (IgG4(S241P))
QVQLVQSGAEVKKPGASVKISCKASGYTFTNYGMNWVRQAPGQGLEWMGWINTYTGEPTYAQKFQGRFTFTLDTSTSTAYLEISSLRSEDTAVYYCSRGNGYYVGMDYWGQGTLVTVSSASTKGPSVFPLAPCSRSTSESTAALGCLVKDYFPEPVTVSWNSGALTSGVHTFPAVLQSSGLYSLSSVVTVPSSSLGTKTYTCNVDHKPSNTKVDKRVESKYGPPCPPCPAPEFLGGPSVFLFPPKPKDTLMISRTPEVTCVVVDVSQEDPEVQFNWYVDGVEVHNAKTKPREEQFNSTYRVVSVLTVLHQDWLNGKEYKCKVSNKGLPSSIEKTISKAKGQPREPQVYTLPPSQEEMTKNQVSLTCLVKGFYPSDIAVEWESNGQPENNYKTTPPVLDSDGSFFLYSRLTVDKSRWQEGNVFSCSVMHEALHNHYTQKSLSLSPGK

SEQ ID NO: 335 - protein, 109 aa, Artificial Sequence; identical to SEQ ID NO: 315
  Variable light (vl) domain

SEQ ID NO: 336 - protein, 14 aa, Artificial Sequence
  vlCDR1
GSSTGAVTTSNHAN

SEQ ID NO: 337 - protein, 7 aa, Artificial Sequence
  vlCDR2
GTNGRGS

SEQ ID NO: 338 - protein, 9 aa, Artificial Sequence
  vlCDR3
ALWFSNHWV

SEQ ID NO: 339 - protein, 214 aa, Artificial Sequence; identical to SEQ ID NO: 319
  Full length light chain

SEQ ID NO: 340 - protein, 119 aa, Artificial Sequence; identical to SEQ ID NO: 330
  CHA.9.560.6 Variable heavy (vh) domain

SEQ ID NO: 341 - protein, 10 aa, Artificial Sequence
  vhCDR1
GYTFTNYGMN

SEQ ID NO: 342 - protein, 10 aa, Artificial Sequence
  vhCDR2
WINTYTGEPT

SEQ ID NO: 343 - protein, 10 aa, Artificial Sequence
  vhCDR3
GNGYYVGMDY

SEQ ID NO: 344 - protein, 446 aa, Artificial Sequence; identical to SEQ ID NO: 334
  Full length HC (IgG4(S241P))

SEQ ID NO: 345 - protein, 109 aa, Artificial Sequence; identical to SEQ ID NO: 325
  Variable light (vl) domain

SEQ ID NO: 346 - protein, 14 aa, Artificial Sequence
  vlCDR1
GSSTGAVTTSNHAN

SEQ ID NO: 347 - protein, 7 aa, Artificial Sequence
  vlCDR2
GTNGRGS

SEQ ID NO: 348 - protein, 9 aa, Artificial Sequence
  vlCDR3
ALWFSNHWV

SEQ ID NO: 349 - protein, 214 aa, Artificial Sequence; identical to SEQ ID NO: 329
  Full length light chain

SEQ ID NO: 350 - protein, 119 aa, Artificial Sequence
  CHA.9.560.7 Variable heavy (vh) domain
QVQLVQSGAEVKKPGASVKISCKASGYTFTNYGMNWVRQAPGQGLEWMGWINTYTGEPTYAQKFQGRFTFTLDASTSTAYLEISSLRSEDTAVYYCSRGNGYYVGMDYWGQGTLVTVSS

SEQ ID NO: 351 - protein, 10 aa, Artificial Sequence
  vhCDR1
GYTFTNYGMN

SEQ ID NO: 352 - protein, 10 aa, Artificial Sequence
  vhCDR2
WINTYTGEPT

SEQ ID NO: 353 - protein, 10 aa, Artificial Sequence
  vhCDR3
GNGYYVGMDY

SEQ ID NO: 354 - protein, 446 aa, Artificial Sequence; identical to SEQ ID NO: 334
  Full length HC (IgG4(S241P))

SEQ ID NO: 355 - protein, 109 aa, Artificial Sequence; identical to SEQ ID NO: 315
  Variable light (vl) domain

SEQ ID NO: 356 - protein, 14 aa, Artificial Sequence
  vlCDR1
GSSTGAVTTSNHAN

SEQ ID NO: 357 - protein, 7 aa, Artificial Sequence
  vlCDR2
GTNGRGS

SEQ ID NO: 358 - protein, 9 aa, Artificial Sequence
  vlCDR3
ALWFSNHWV

SEQ ID NO: 359 - protein, 214 aa, Artificial Sequence; identical to SEQ ID NO: 319
  Full length light chain

SEQ ID NO: 360 - protein, 119 aa, Artificial Sequence; identical to SEQ ID NO: 350
  CHA.9.560.8 Variable heavy (vh) domain

SEQ ID NO: 361 - protein, 10 aa, Artificial Sequence
  vhCDR1
GYTFTNYGMN

SEQ ID NO: 362 - protein, 10 aa, Artificial Sequence
  vhCDR2
WINTYTGEPT

SEQ ID NO: 363 - protein, 10 aa, Artificial Sequence
  vhCDR3
GNGYYVGMDY

SEQ ID NO: 364 - protein, 446 aa, Artificial Sequence
  Full length HC (IgG4(S241P))
QVQLVQSGAEVKKPGASVKISCKASGYTFTNYGMNWVRQAPGQGLEWMGWINTYTGEPTYAQKFQGRFTFTLDASTSTAYLEISSLRSEDTAVYYCSRGNGYYVGMDYWGQGTLVTVSSASTKGPSVFPLAPCSRSTSESTAALGCLVKDYFPEPVTVSWNSGALTSGVHTFPAVLQSSGLYSLSSVVTVPSSSLGTKTYTCNVDHKPSNTKVDKRVESKYGPPCPPCPAPEFLGGPSVFLFPPKPKDTLMISRTPEVTCVVVDVSQEDPEVQFNWYVDGVEVHNAKTKPREEQFNSTYRVVSVLTVLHQDWLNGKEYKCKVSNKGLPSSIEKTISKAKGQPREPQVYTLPPSQEEMTKNQVSLTCLVKGFYPSDIAVEWESNGQPENNYKTTPPVLDSDGSFFLYSRLTVDKSRWQEGNVFSCSVMHEALHNHYTQKSLSLSPGK

SEQ ID NO: 365 - protein, 109 aa, Artificial Sequence; identical to SEQ ID NO: 325
  Variable light (vl) domain

SEQ ID NO: 366 - protein, 14 aa, Artificial Sequence
  vlCDR1
GSSTGAVTTSNHAN

SEQ ID NO: 367 - protein, 7 aa, Artificial Sequence
  vlCDR2
GTNGRGS

SEQ ID NO: 368 - protein, 9 aa, Artificial Sequence
  vlCDR3
ALWFSNHWV

SEQ ID NO: 369 - protein, 214 aa, Artificial Sequence; identical to SEQ ID NO: 329
  Full length light chain

SEQ ID NO: 370 - protein, 119 aa, Artificial Sequence
  CHA.9.546.1 Variable heavy (vh) domain
EVQLVESGGGLVQPGGSLRLSCAASGFTFSSYIMSWVRQAPGKGLEWVSTISGGGTNTYYADSVKGRFTISRDNSKNTLYLQMNSLRAEDTAVYYCARWLLSYYAMDYWGQGTLVTVSS

SEQ ID NO: 371 - protein, 10 aa, Artificial Sequence
  vhCDR1
GFTFSSYIMS

SEQ ID NO: 372 - protein, 10 aa, Artificial Sequence
  vhCDR2
TISGGGTNTY

SEQ ID NO: 373 - protein, 10 aa, Artificial Sequence
  vhCDR3
WLLSYYAMDY

SEQ ID NO: 374 - protein, 446 aa, Artificial Sequence
  Full length HC (IgG4(S241P))
EVQLVESGGGLVQPGGSLRLSCAASGFTFSSYIMSWVRQAPGKGLEWVSTISGGGTNTYYADSVKGRFTISRDNSKNTLYLQMNSLRAEDTAVYYCARWLLSYYAMDYWGQGTLVTVSSASTKGPSVFPLAPCSRSTSESTAALGCLVKDYFPEPVTVSWNSGALTSGVHTFPAVLQSSGLYSLSSVVTVPSSSLGTKTYTCNVDHKPSNTKVDKRVESKYGPPCPPCPAPEFLGGPSVFLFPPKPKDTLMISRTPEVTCVVVDVSQEDPEVQFNWYVDGVEVHNAKTKPREEQFNSTYRVVSVLTVLHQDWLNGKEYKCKVSNKGLPSSIEKTISKAKGQPREPQVYTLPPSQEEMTKNQVSLTCLVKGFYPSDIAVEWESNGQPENNYKTTPPVLDSDGSFFLYSRLTVDKSRWQEGNVFSCSVMHEALHNHYTQKSLSLSPGK

SEQ ID NO: 375 - protein, 107 aa, Artificial Sequence
  Variable light (vl) domain
DIQMTQSPSSLSASVGDRVTITCRASQNINVWLTWYQQKPGKAPKLLIYKASNLHTGVPSRFSGSGSGTDFTLTISSLQPEDFATYYCQQGQSYPYTFGQGTKLEIK

SEQ ID NO: 376 - protein, 11 aa, Artificial Sequence
  vlCDR1
RASQNINVWLT

SEQ ID NO: 377 - protein, 7 aa, Artificial Sequence
  vlCDR2
KASNLHT

SEQ ID NO: 378 - protein, 9 aa, Artificial Sequence
  vlCDR3
QQGQSYPYT

SEQ ID NO: 379 - protein, 214 aa, Artificial Sequence
  Full length light chain
DIQMTQSPSSLSASVGDRVTITCRASQNINVWLTWYQQKPGKAPKLLIYKASNLHTGVPSRFSGSGSGTDFTLTISSLQPEDFATYYCQQGQSYPYTFGQGTKLEIKRTVAAPSVFIFPPSDEQLKSGTASVVCLLNNFYPREAKVQWKVDNALQSGNSQESVTEQDSKDSTYSLSSTLTLSKADYEKHKVYACEVTHQGLSSPVTKSFNRGEC

SEQ ID NO: 380 - protein, 119 aa, Artificial Sequence
  CHA.9.547.1 Variable heavy (vh) domain
EVQLVESGGGLVQPGGSLRLSCAASGFTFSSYIMSWVRQAPGKGLEWVSTISGGGTNTYYADSVKGRFTISRDNSKNTLYLQMNSLRAEDTAVYYCAKWLLSYYAMDYWGQGTLVTVSS

SEQ ID NO: 381 - protein, 10 aa, Artificial Sequence
  vhCDR1
GFTFSSYIMS

SEQ ID NO: 382 - protein, 10 aa, Artificial Sequence
  vhCDR2
TISGGGTNTY

SEQ ID NO: 383 - protein, 10 aa, Artificial Sequence
  vhCDR3
WLLSYYAMDY

SEQ ID NO: 384 - protein, 446 aa, Artificial Sequence
  Full length HC (IgG4(S241P))
EVQLVESGGGLVQPGGSLRLSCAASGFTFSSYIMSWVRQAPGKGLEWVSTISGGGTNTYYADSVKGRFTISRDNSKNTLYLQMNSLRAEDTAVYYCAKWLLSYYAMDYWGQGTLVTVSSASTKGPSVFPLAPCSRSTSESTAALGCLVKDYFPEPVTVSWNSGALTSGVHTFPAVLQSSGLYSLSSVVTVPSSSLGTKTYTCNVDHKPSNTKVDKRVESKYGPPCPPCPAPEFLGGPSVFLFPPKPKDTLMISRTPEVTCVVVDVSQEDPEVQFNWYVDGVEVHNAKTKPREEQFNSTYRVVSVLTVLHQDWLNGKEYKCKVSNKGLPSSIEKTISKAKGQPREPQVYTLPPSQEEMTKNQVSLTCLVKGFYPSDIAVEWESNGQPENNYKTTPPVLDSDGSFFLYSRLTVDKSRWQEGNVFSCSVMHEALHNHYTQKSLSLSPGK

SEQ ID NO: 385 - protein, 107 aa, Artificial Sequence; identical to SEQ ID NO: 375
  Variable light (vl) domain

SEQ ID NO: 386 - protein, 11 aa, Artificial Sequence
  vlCDR1
RASQNINVWLT

SEQ ID NO: 387 - protein, 7 aa, Artificial Sequence
  vlCDR2
KASNLHT

SEQ ID NO: 388 - protein, 9 aa, Artificial Sequence
  vlCDR3
QQGQSYPYT

SEQ ID NO: 389 - protein, 214 aa, Artificial Sequence; identical to SEQ ID NO: 379
  Full length light chain

SEQ ID NO: 390 - protein, 119 aa, Artificial Sequence
  CHA.9.547.2 Variable heavy (vh) domain
EVQLVESGGGLVQPGGSLRLSCAASGFTFSSYIMSWVRQAPGKGLEWVATISGGGTNTYYADSVKGRFTISRDNSKNTLYLQMNSLRAEDTAVYYCAKWLLSYYAMDYWGQGTLVTVSS

SEQ ID NO: 391 - protein, 10 aa, Artificial Sequence
  vhCDR1
GFTFSSYIMS

SEQ ID NO: 392 - protein, 10 aa, Artificial Sequence
  vhCDR2
TISGGGTNTY

SEQ ID NO: 393 - protein, 10 aa, Artificial Sequence
  vhCDR3
WLLSYYAMDY

SEQ ID NO: 394 - protein, 446 aa, Artificial Sequence
  Full length HC (IgG4(S241P))
EVQLVESGGGLVQPGGSLRLSCAASGFTFSSYIMSWVRQAPGKGLEWVATISGGGTNTYYADSVKGRFTISRDNSKNTLYLQMNSLRAEDTAVYYCAKWLLSYYAMDYWGQGTLVTVSSASTKGPSVFPLAPCSRSTSESTAALGCLVKDYFPEPVTVSWNSGALTSGVHTFPAVLQSSGLYSLSSVVTVPSSSLGTKTYTCNVDHKPSNTKVDKRVESKYGPPCPPCPAPEFLGGPSVFLFPPKPKDTLMISRTPEVTCVVVDVSQEDPEVQFNWYVDGVEVHNAKTKPREEQFNSTYRVVSVLTVLHQDWLNGKEYKCKVSNKGLPSSIEKTISKAKGQPREPQVYTLPPSQEEMTKNQVSLTCLVKGFYPSDIAVEWESNGQPENNYKTTPPVLDSDGSFFLYSRLTVDKSRWQEGNVFSCSVMHEALHNHYTQKSLSLSPGK

SEQ ID NO: 395 - protein, 107 aa, Artificial Sequence; identical to SEQ ID NO: 375
  Variable light (vl) domain

SEQ ID NO: 396 - protein, 11 aa, Artificial Sequence
  vlCDR1
RASQNINVWLT

SEQ ID NO: 397 - protein, 7 aa, Artificial Sequence
  vlCDR2
KASNLHT

SEQ ID NO: 398 - protein, 9 aa, Artificial Sequence
  vlCDR3
QQGQSYPYT

SEQ ID NO: 399 - protein, 214 aa, Artificial Sequence; identical to SEQ ID NO: 379
  Full length light chain

SEQ ID NO: 400 - protein, 119 aa, Artificial Sequence; identical to SEQ ID NO: 380
  CHA.9.547.3 Variable heavy (vh) domain

SEQ ID NO: 401 - protein, 10 aa, Artificial Sequence
  vhCDR1
GFTFSSYIMS

SEQ ID NO: 402 - protein, 10 aa, Artificial Sequence
  vhCDR2
TISGGGTNTY

SEQ ID NO: 403 - protein, 10 aa, Artificial Sequence
  vhCDR3
WLLSYYAMDY

SEQ ID NO: 404 - protein, 446 aa, Artificial Sequence; identical to SEQ ID NO: 384
  Full length HC (IgG4(S241P))

SEQ ID NO: 405 - protein, 107 aa, Artificial Sequence
  Variable light (vl) domain
DIQMTQSPSSLSASVGDRITITCRASQNINVWLTWYQQKPGKAPKLLIYKASNLHTGVPSRFSGSGSGTDFTLTISSLQPEDFATYYCQQGQSYPYTFGQGTKLEIK

SEQ ID NO: 406 - protein, 11 aa, Artificial Sequence
  vlCDR1
RASQNINVWLT

SEQ ID NO: 407 - protein, 7 aa, Artificial Sequence
  vlCDR2
KASNLHT

SEQ ID NO: 408 - protein, 9 aa, Artificial Sequence
  vlCDR3
QQGQSYPYT

SEQ ID NO: 409 - protein, 214 aa, Artificial Sequence
  Full length light chain
DIQMTQSPSSLSASVGDRITITCRASQNINVWLTWYQQKPGKAPKLLIYKASNLHTGVPSRFSGSGSGTDFTLTISSLQPEDFATYYCQQGQSYPYTFGQGTKLEIKRTVAAPSVFIFPPSDEQLKSGTASVVCLLNNFYPREAKVQWKVDNALQSGNSQESVTEQDSKDSTYSLSSTLTLSKADYEKHKVYACEVTHQGLSSPVTKSFNRGEC

SEQ ID NO: 410 - protein, 119 aa, Artificial Sequence; identical to SEQ ID NO: 390
  CHA.9.547.4 Variable heavy (vh) domain

SEQ ID NO: 411 - protein, 10 aa, Artificial Sequence
  vhCDR1
GFTFSSYIMS

SEQ ID NO: 412 - protein, 10 aa, Artificial Sequence
  vhCDR2
TISGGGTNTY

SEQ ID NO: 413 - protein, 10 aa, Artificial Sequence
  vhCDR3
WLLSYYAMDY

SEQ ID NO: 414 - protein, 446 aa, Artificial Sequence; identical to SEQ ID NO: 394
  Full length HC (IgG4(S241P))

SEQ ID NO: 415 - protein, 107 aa, Artificial Sequence; identical to SEQ ID NO: 405
  Variable light (vl) domain

SEQ ID NO: 416 - protein, 11 aa, Artificial Sequence
  vlCDR1
RASQNINVWLT

SEQ ID NO: 417 - protein, 7 aa, Artificial Sequence
  vlCDR2
KASNLHT

SEQ ID NO: 418 - protein, 9 aa, Artificial Sequence
  vlCDR3
QQGQSYPYT

SEQ ID NO: 419 - protein, 214 aa, Artificial Sequence; identical to SEQ ID NO: 409
  Full length light chain

SEQ ID NO: 420 - protein, 119 aa, Artificial Sequence; identical to SEQ ID NO: 380
  CHA.9.547.6 Variable heavy (vh) domain

SEQ ID NO: 421 - protein, 10 aa, Artificial Sequence
  vhCDR1
GFTFSSYIMS

SEQ ID NO: 422 - protein, 10 aa, Artificial Sequence
  vhCDR2
TISGGGTNTY

SEQ ID NO: 423 - protein, 10 aa, Artificial Sequence
  vhCDR3
WLLSYYAMDY

SEQ ID NO: 424 - protein, 446 aa, Artificial Sequence; identical to SEQ ID NO: 384
  Full length HC (IgG4(S241P))

SEQ ID NO: 425 - protein, 107 aa, Artificial Sequence
  Variable light (vl) domain
DIQMTQSPSSLSASVGDRVTITCRASQNINVWLTWYQQKPGKAPKLLIYKASKSHTGVPSRFSGSGSGTDFTLTISSLQPEDFATYYCQQGQSYPYTFGQGTKLEIK

SEQ ID NO: 426 - protein, 11 aa, Artificial Sequence
  vlCDR1
RASQNINVWLT

SEQ ID NO: 427 - protein, 7 aa, Artificial Sequence
  vlCDR2
KASKSHT

SEQ ID NO: 428 - protein, 9 aa, Artificial Sequence
  vlCDR3
QQGQSYPYT

SEQ ID NO: 429 - protein, 214 aa, Artificial Sequence
  Full length light chain
DIQMTQSPSSLSASVGDRVTITCRASQNINVWLTWYQQKPGKAPKLLIYKASKSHTGVPSRFSGSGSGTDFTLTISSLQPEDFATYYCQQGQSYPYTFGQGTKLEIKRTVAAPSVFIFPPSDEQLKSGTASVVCLLNNFYPREAKVQWKVDNALQSGNSQESVTEQDSKDSTYSLSSTLTLSKADYEKHKVYACEVTHQGLSSPVTKSFNRGEC

SEQ ID NO: 430 - protein, 119 aa, Artificial Sequence; identical to SEQ ID NO: 390
  CHA.9.547.7 Variable heavy (vh) domain

SEQ ID NO: 431 - protein, 10 aa, Artificial Sequence
  vhCDR1
GFTFSSYIMS

SEQ ID NO: 432 - protein, 10 aa, Artificial Sequence
  vhCDR2
TISGGGTNTY

SEQ ID NO: 433 - protein, 10 aa, Artificial Sequence
  vhCDR3
WLLSYYAMDY

SEQ ID NO: 434 - protein, 446 aa, Artificial Sequence; identical to SEQ ID NO: 394
  Full length HC (IgG4(S241P))

SEQ ID NO: 435 - protein, 107 aa, Artificial Sequence; identical to SEQ ID NO: 425
  Variable light (vl) domain

SEQ ID NO: 436 - protein, 11 aa, Artificial Sequence
  vlCDR1
RASQNINVWLT

SEQ ID NO: 437 - protein, 7 aa, Artificial Sequence
  vlCDR2
KASKSHT

SEQ ID NO: 438 - protein, 9 aa, Artificial Sequence
  vlCDR3
QQGQSYPYT

SEQ ID NO: 439 - protein, 214 aa, Artificial Sequence; identical to SEQ ID NO: 429
  Full length light chain

SEQ ID NO: 440 - protein, 119 aa, Artificial Sequence; identical to SEQ ID NO: 380
  CHA.9.547.8 Variable heavy (vh) domain

SEQ ID NO: 441 - protein, 10 aa, Artificial Sequence
  vhCDR1
GFTFSSYIMS

SEQ ID NO: 442 - protein, 10 aa, Artificial Sequence
  vhCDR2
TISGGGTNTY

SEQ ID NO: 443 - protein, 10 aa, Artificial Sequence
  vhCDR3
WLLSYYAMDY

SEQ ID NO: 444 - protein, 446 aa, Artificial Sequence; identical to SEQ ID NO: 384
  Full length HC (IgG4(S241P))

SEQ ID NO: 445 - protein, 107 aa, Artificial Sequence
  Variable light (vl) domain
DIQMTQSPSSLSASVGDRITITCRASQNINVWLTWYQQKPGKAPKLLIYKASKSHTGVPSRFSGSGSGTDFTLTISSLQPEDFATYYCQQGQSYPYTFGQGTKLEIK

SEQ ID NO: 446 - protein, 11 aa, Artificial Sequence
  vlCDR1
RASQNINVWLT

SEQ ID NO: 447 - protein, 7 aa, Artificial Sequence
  vlCDR2
KASKSHT

SEQ ID NO: 448 - protein, 9 aa, Artificial Sequence
  vlCDR3
QQGQSYPYT

SEQ ID NO: 449 - protein, 214 aa, Artificial Sequence
  Full length light chain
DIQMTQSPSSLSASVGDRITITCRASQNINVWLTWYQQKPGKAPKLLIYKASKSHTGVPSRFSGSGSGTDFTLTISSLQPEDFATYYCQQGQSYPYTFGQGTKLEIKRTVAAPSVFIFPPSDEQLKSGTASVVCLLNNFYPREAKVQWKVDNALQSGNSQESVTEQDSKDSTYSLSSTLTLSKADYEKHKVYACEVTHQGLSSPVTKSFNRGEC

SEQ ID NO: 450 - protein, 119 aa, Artificial Sequence; identical to SEQ ID NO: 390
  CHA.9.547.9 Variable heavy (vh) domain

SEQ ID NO: 451 - protein, 10 aa, Artificial Sequence
  vhCDR1
GFTFSSYIMS

SEQ ID NO: 452 - protein, 10 aa, Artificial Sequence
  vhCDR2
TISGGGTNTY

SEQ ID NO: 453 - protein, 10 aa, Artificial Sequence
  vhCDR3
WLLSYYAMDY

SEQ ID NO: 454 - protein, 446 aa, Artificial Sequence; identical to SEQ ID NO: 394
  Full length HC (IgG4(S241P))

SEQ ID NO: 455 - protein, 107 aa, Artificial Sequence; identical to SEQ ID NO: 445
  Variable light (vl) domain

SEQ ID NO: 456 - protein, 11 aa, Artificial Sequence
  vlCDR1
RASQNINVWLT

SEQ ID NO: 457 - protein, 7 aa, Artificial Sequence
  vlCDR2
KASKSHT

SEQ ID NO: 458 - protein, 9 aa, Artificial Sequence
  vlCDR3
QQGQSYPYT

SEQ ID NO: 459 - protein, 214 aa, Artificial Sequence; identical to SEQ ID NO: 449
  Full length light chain

SEQ ID NO: 460 - protein, 119 aa, Artificial Sequence
  CHA.9.541.1 Variable heavy (vh) domain
QVQLVQSGAEVKKPGASVKVSCKASGYTITNYGMNWVRQAPGQGLEWMGWINTYTGEPTYAQKFQGRVTMTRDTSTSTVYMELSSLRSEDTAVYYCARGNGNPLGMDYWGQGTLVTVSS

SEQ ID NO: 461 - protein, 10 aa, Artificial Sequence
  vhCDR1
GYTITNYGMN

SEQ ID NO: 462 - protein, 10 aa, Artificial Sequence
  vhCDR2
WINTYTGEPT

SEQ ID NO: 463 - protein, 10 aa, Artificial Sequence
  vhCDR3
GNGNPLGMDY

SEQ ID NO: 464 - protein, 446 aa, Artificial Sequence
  Full length HC (IgG4(S241P))
QVQLVQSGAEVKKPGASVKVSCKASGYTITNYGMNWVRQAPGQGLEWMGWINTYTGEPTYAQKFQGRVTMTRDTSTSTVYMELSSLRSEDTAVYYCARGNGNPLGMDYWGQGTLVTVSSASTKGPSVFPLAPCSRSTSESTAALGCLVKDYFPEPVTVSWNSGALTSGVHTFPAVLQSSGLYSLSSVVTVPSSSLGTKTYTCNVDHKPSNTKVDKRVESKYGPPCPPCPAPEFLGGPSVFLFPPKPKDTLMISRTPEVTCVVVDVSQEDPEVQFNWYVDGVEVHNAKTKPREEQFNSTYRVVSVLTVLHQDWLNGKEYKCKVSNKGLPSSIEKTISKAKGQPREPQVYTLPPSQEEMTKNQVSLTCLVKGFYPSDIAVEWESNGQPENNYKTTPPVLDSDGSFFLYSRLTVDKSRWQEGNVFSCSVMHEALHNHYTQKSLSLSPGK

SEQ ID NO: 465 - protein, 106 aa, Artificial Sequence
  Variable light (vl) domain
EIVLTQSPATLSLSPGERATLSCGNGNPLGMDYWYQQKPGQAPRLLIYDTSKLASGIPARFSGSGSGTDFTLTISSLEPEDFAVYYCFQGSGYPLTFGQGTKLEIK

SEQ ID NO: 466 - protein, 10 aa, Artificial Sequence
  vlCDR1
GNGNPLGMDY

SEQ ID NO: 467 - protein, 7 aa, Artificial Sequence
  vlCDR2
DTSKLAS

SEQ ID NO: 468 - protein, 9 aa, Artificial Sequence
  vlCDR3
FQGSGYPLT

SEQ ID NO: 469 - protein, 213 aa, Artificial Sequence
  Full length light chain
EIVLTQSPATLSLSPGERATLSCGNGNPLGMDYWYQQKPGQAPRLLIYDTSKLASGIPARFSGSGSGTDFTLTISSLEPEDFAVYYCFQGSGYPLTFGQGTKLEIKRTVAAPSVFIFPPSDEQLKSGTASVVCLLNNFYPREAKVQWKVDNALQSGNSQESVTEQDSKDSTYSLSSTLTLSKADYEKHKVYACEVTHQGLSSPVTKSFNRGEC

SEQ ID NO: 470 - protein, 119 aa, Artificial Sequence
  CHA.9.541.3
QVQLVQSGAEVKKPGASVKVSCKASGYTITNYGMNWVRQAPGQGLEWMGWINTYTGEPTYAQKFQGRFTMTLDTSTSTVYMELSSLRSEDTAVYYCARGNGNPLGMDYWGQGTLVTVSS

SEQ ID NO: 471 - protein, 10 aa, Artificial Sequence
  vhCDR1
GYTITNYGMN

SEQ ID NO: 472 - protein, 10 aa, Artificial Sequence
  vhCDR2
WINTYTGEPT

SEQ ID NO: 473 - protein, 10 aa, Artificial Sequence
  vhCDR3
GNGNPLGMDY

SEQ ID NO: 474 - protein, 446 aa, Artificial Sequence
  Full length HC (IgG4(S241P))
QVQLVQSGAEVKKPGASVKVSCKASGYTITNYGMNWVRQAPGQGLEWMGWINTYTGEPTYAQKFQGRFTMTLDTSTSTVYMELSSLRSEDTAVYYCARGNGNPLGMDYWGQGTLVTVSSASTKGPSVFPLAPCSRSTSESTAALGCLVKDYFPEPVTVSWNSGALTSGVHTFPAVLQSSGLYSLSSVVTVPSSSLGTKTYTCNVDHKPSNTKVDKRVESKYGPPCPPCPAPEFLGGPSVFLFPPKPKDTLMISRTPEVTCVVVDVSQEDPEVQFNWYVDGVEVHNAKTKPREEQFNSTYRVVSVLTVLHQDWLNGKEYKCKVSNKGLPSSIEKTISKAKGQPREPQVYTLPPSQEEMTKNQVSLTCLVKGFYPSDIAVEWESNGQPENNYKTTPPVLDSDGSFFLYSRLTVDKSRWQEGNVFSCSVMHEALHNHYTQKSLSLSPGK

SEQ ID NO: 475 - protein, 106 aa, Artificial Sequence
  Variable light (vl) domain
EIVLTQSPATLSLSPGERATLSCGNGNPLGMDYWYQQKPGQAPRLLIYDTSKLASGIPARFSGSGSGTDYTLTISSLEPEDFAVYYCFQGSGYPLTFGQGTKLEIK

SEQ ID NO: 476 - protein, 10 aa, Artificial Sequence
  vlCDR1
GNGNPLGMDY

SEQ ID NO: 477 - protein, 7 aa, Artificial Sequence
  vlCDR2
DTSKLAS

SEQ ID NO: 478 - protein, 9 aa, Artificial Sequence
  vlCDR3
FQGSGYPLT

SEQ ID NO: 479 - protein, 213 aa, Artificial Sequence
  Full length light chain
EIVLTQSPATLSLSPGERATLSCGNGNPLGMDYWYQQKPGQAPRLLIYDTSKLASGIPARFSGSGSGTDYTLTISSLEPEDFAVYYCFQGSGYPLTFGQGTKLEIKRTVAAPSVFIFPPSDEQLKSGTASVVCLLNNFYPREAKVQWKVDNALQSGNSQESVTEQDSKDSTYSLSSTLTLSKADYEKHKVYACEVTHQGLSSPVTKSFNRGEC

SEQ ID NO: 480 - protein, 119 aa, Artificial Sequence; identical to SEQ ID NO: 470
  CHA.9.541.4 Variable heavy (vh) domain

SEQ ID NO: 481 - protein, 10 aa, Artificial Sequence
  vhCDR1
GYTITNYGMN

SEQ ID NO: 482 - protein, 10 aa, Artificial Sequence
  vhCDR2
WINTYTGEPT

SEQ ID NO: 483 - protein, 10 aa, Artificial Sequence
  vhCDR3
GNGNPLGMDY

SEQ ID NO: 484 - protein, 446 aa, Artificial Sequence; identical to SEQ ID NO: 474
  Full length HC (IgG4(S241P))

SEQ ID NO: 485 - protein, 106 aa, Artificial Sequence
  Variable light (vl) domain
EIVLTQSPATLSLSPGERATLSCGNGNPLGMDYWYQQKPGQAPRLWIYDTSKLASGVPARFSGSGSGTDYTLTISSLEPEDFAVYYCFQGSGYPLTFGQGTKLEIK

SEQ ID NO: 486 - protein, 10 aa, Artificial Sequence
  vlCDR1
GNGNPLGMDY

SEQ ID NO: 487 - protein, 7 aa, Artificial Sequence
  vlCDR2
DTSKLAS

SEQ ID NO: 488 - protein, 9 aa, Artificial Sequence
  vlCDR3
FQGSGYPLT

SEQ ID NO: 489 - protein, 213 aa, Artificial Sequence
  Full length light chain
EIVLTQSPATLSLSPGERATLSCGNGNPLGMDYWYQQKPGQAPRLWIYDTSKLASGVPARFSGSGSGTDYTLTISSLEPEDFAVYYCFQGSGYPLTFGQGTKLEIKRTVAAPSVFIFPPSDEQLKSGTASVVCLLNNFYPREAKVQWKVDNALQSGNSQESVTEQDSKDSTYSLSSTLTLSKADYEKHKVYACEVTHQGLSSPVTKSFNRGEC

SEQ ID NO: 490 - protein, 119 aa, Artificial Sequence; identical to SEQ ID NO: 470
  CHA.9.541.5 Variable heavy (vh) domain

SEQ ID NO: 491 - protein, 10 aa, Artificial Sequence
  vhCDR1
GYTITNYGMN

SEQ ID NO: 492 - protein, 10 aa, Artificial Sequence
  vhCDR2
WINTYTGEPT

SEQ ID NO: 493 - protein, 10 aa, Artificial Sequence
  vhCDR3
GNGNPLGMDY

SEQ ID NO: 494 - protein, 446 aa, Artificial Sequence; identical to SEQ ID NO: 474
  Full length HC (IgG4(S241P))

SEQ ID NO: 495 - protein, 106 aa, Artificial Sequence
  Variable light (vl) domain
EIVLTQSPATLSLSPGERVTMSCGNGNPLGMDYWYQQKPGQAPRLWIYDTSKLASGVPARFSGSGSGTDYTLTISSMEPEDFAVYYCFQGSGYPLTFGQGTKLEIK

SEQ ID NO: 496 - protein, 10 aa, Artificial Sequence
  vlCDR1
GNGNPLGMDY

SEQ ID NO: 497 - protein, 7 aa, Artificial Sequence
  vlCDR2
DTSKLAS

SEQ ID NO: 498 - protein, 9 aa, Artificial Sequence
  vlCDR3
FQGSGYPLT

SEQ ID NO: 499 - protein, 213 aa, Artificial Sequence
  Full length light chain
EIVLTQSPATLSLSPGERVTMSCGNGNPLGMDYWYQQKPGQAPRLWIYDTSKLASGVPARFSGSGSGTDYTLTISSMEPEDFAVYYCFQGSGYPLTFGQGTKLEIKRTVAAPSVFIFPPSDEQLKSGTASVVCLLNNFYPREAKVQWKVDNALQSGNSQESVTEQDSKDSTYSLSSTLTLSKADYEKHKVYACEVTHQGLSSPVTKSFNRGEC

SEQ ID NO: 500 - protein, 119 aa, Artificial Sequence
  CHA.9.541.6 Variable heavy (vh) domain
QVQLVQSGAEVKKPGASVKISCKASGYTITNYGMNWVRQAPGQGLEWMGWINTYTGEPTYAQKFQGRFTITLDTSTSTVYLEISSLRSEDTAVYYCARGNGNPLGMDYWGQGTLVTVSS

SEQ ID NO: 501 - protein, 10 aa, Artificial Sequence
  vhCDR1
GYTITNYGMN

SEQ ID NO: 502 - protein, 10 aa, Artificial Sequence
  vhCDR2
WINTYTGEPT

SEQ ID NO: 503 - protein, 10 aa, Artificial Sequence
  vhCDR3
GNGNPLGMDY

SEQ ID NO: 504 - protein, 446 aa, Artificial Sequence
  Full length HC (IgG4(S241P))
QVQLVQSGAEVKKPGASVKISCKASGYTITNYGMNWVRQAPGQGLEWMGWINTYTGEPTYAQKFQGRFTITLDTSTSTVYLEISSLRSEDTAVYYCARGNGNPLGMDYWGQGTLVTVSSASTKGPSVFPLAPCSRSTSESTAALGCLVKDYFPEPVTVSWNSGALTSGVHTFPAVLQSSGLYSLSSVVTVPSSSLGTKTYTCNVDHKPSNTKVDKRVESKYGPPCPPCPAPEFLGGPSVFLFPPKPKDTLMISRTPEVTCVVVDVSQEDPEVQFNWYVDGVEVHNAKTKPREEQFNSTYRVVSVLTVLHQDWLNGKEYKCKVSNKGLPSSIEKTISKAKGQPREPQVYTLPPSQEEMTKNQVSLTCLVKGFYPSDIAVEWESNGQPENNYKTTPPVLDSDGSFFLYSRLTVDKSRWQEGNVFSCSVMHEALHNHYTQKSLSLSPGK

SEQ ID NO: 505 - protein, 106 aa, Artificial Sequence; identical to SEQ ID NO: 475
  Variable light (vl) domain

SEQ ID NO: 506 - protein, 10 aa, Artificial Sequence
  vlCDR1
GNGNPLGMDY

SEQ ID NO: 507 - protein, 7 aa, Artificial Sequence
  vlCDR2
DTSKLAS

SEQ ID NO: 508 - protein, 9 aa, Artificial Sequence
  vlCDR3
FQGSGYPLT

SEQ ID NO: 509 - protein, 213 aa, Artificial Sequence; identical to SEQ ID NO: 479
  Full length light chain

SEQ ID NO: 510 - protein, 119 aa, Artificial Sequence; identical to SEQ ID NO: 500
  CHA.9.541.7 Variable heavy (vh) domain

SEQ ID NO: 511 - protein, 10 aa, Artificial Sequence
  vhCDR1
GYTITNYGMN

SEQ ID NO: 512 - protein, 10 aa, Artificial Sequence
  vhCDR2
WINTYTGEPT

SEQ ID NO: 513 - protein, 10 aa, Artificial Sequence
  vhCDR3
GNGNPLGMDY

SEQ ID NO: 514 - protein, 446 aa, Artificial Sequence; identical to SEQ ID NO: 504
  Full length HC (IgG4(S241P))

SEQ ID NO: 515 - protein, 106 aa, Artificial Sequence; identical to SEQ ID NO: 485
  Variable light (vl) domain

SEQ ID NO: 516 - protein, 10 aa, Artificial Sequence
  vlCDR1
GNGNPLGMDY

SEQ ID NO: 517 - protein, 7 aa, Artificial Sequence
  vlCDR2
DTSKLAS

SEQ ID NO: 518 - protein, 9 aa, Artificial Sequence
  vlCDR3
FQGSGYPLT

SEQ ID NO: 519 - protein, 213 aa, Artificial Sequence; identical to SEQ ID NO: 489
  Full length light chain

SEQ ID NO: 520 - protein, 119 aa, Artificial Sequence; identical to SEQ ID NO: 500
  CHA.9.541.8 Variable heavy (vh) domain

SEQ ID NO: 521 - protein, 10 aa, Artificial Sequence
  vhCDR1
GYTITNYGMN

SEQ ID NO: 522 - protein, 10 aa, Artificial Sequence
  vhCDR2
WINTYTGEPT

SEQ ID NO: 523 - protein, 10 aa, Artificial Sequence
  vhCDR3
GNGNPLGMDY

SEQ ID NO: 524 - protein, 446 aa, Artificial Sequence; identical to SEQ ID NO: 504
  Full length HC (IgG4(S241P))

SEQ ID NO: 525 - protein, 106 aa, Artificial Sequence; identical to SEQ ID NO: 495
  Variable light (vl) domain

SEQ ID NO: 526 - protein, 10 aa, Artificial Sequence
  vlCDR1
GNGNPLGMDY

SEQ ID NO: 527 - protein, 7 aa, Artificial Sequence
  vlCDR2
DTSKLAS

SEQ ID NO: 528 - protein, 9 aa, Artificial Sequence
  vlCDR3
FQGSGYPLT

SEQ ID NO: 529 - protein, 213 aa, Artificial Sequence; identical to SEQ ID NO: 499
  Full length light chain

SEQ ID NO: 530 - protein, 119 aa, Artificial Sequence; identical to SEQ ID NO: 380
  CHA.9.547.10 Variable heavy (vh) domain

SEQ ID NO: 531 - protein, 10 aa, Artificial Sequence
  vhCDR1
GFTFSSYIMS

SEQ ID NO: 532 - protein, 10 aa, Artificial Sequence
  vhCDR2
TISGGGTNTY

SEQ ID NO: 533 - protein, 10 aa, Artificial Sequence
  vhCDR3
WLLSYYAMDY

SEQ ID NO: 534 - protein, 446 aa, Artificial Sequence; identical to SEQ ID NO: 384
  Full length HC

SEQ ID NO: 535 - protein, 107 aa, Artificial Sequence
  Variable light (vl) domain
DIQMTQSPSSLSASVGDRVTITCRASQNINVWLSWYQQKPGKAPKLLIYKASKSHTGVPSRFSGSGSGTDFTLTISSLQPEDFATYYCQQGQSYPYTFGQGTKLEIK

SEQ ID NO: 536 - protein, 11 aa, Artificial Sequence
  vlCDR1
RASQNINVWLS

SEQ ID NO: 537 - protein, 7 aa, Artificial Sequence
  vlCDR2
KASKSHT

SEQ ID NO: 538 - protein, 9 aa, Artificial Sequence
  vlCDR3
QQGQSYPYT

SEQ ID NO: 539 - protein, 214 aa, Artificial Sequence
  Full length light chain
DIQMTQSPSSLSASVGDRVTITCRASQNINVWLSWYQQKPGKAPKLLIYKASKSHTGVPSRFSGSGSGTDFTLTISSLQPEDFATYYCQQGQSYPYTFGQGTKLEIKRTVAAPSVFIFPPSDEQLKSGTASVVCLLNNFYPREAKVQWKVDNALQSGNSQESVTEQDSKDSTYSLSSTLTLSKADYEKHKVYACEVTHQGLSSPVTKSFNRGEC

SEQ ID NO: 540 - protein, 119 aa, Artificial Sequence; identical to SEQ ID NO: 380
  CHA.9.547.11 Variable heavy (vh) domain

SEQ ID NO: 541 - protein, 10 aa, Artificial Sequence
  vhCDR1
GFTFSSYIMS

SEQ ID NO: 542 - protein, 10 aa, Artificial Sequence
  vhCDR2
TISGGGTNTY

SEQ ID NO: 543 - protein, 10 aa, Artificial Sequence
  vhCDR3
WLLSYYAMDY

SEQ ID NO: 544 - protein, 446 aa, Artificial Sequence; identical to SEQ ID NO: 384
  Full length HC

SEQ ID NO: 545 - protein, 107 aa, Artificial Sequence
  Variable light (vl) domain
DIQMTQSPSSLSASVGDRITITCRASQNINVWLSWYQQKPGKAPKLLIYKASKSHTGVPSRFSGSGSGTDFTLTISSLQPEDFATYYCQQGQSYPYTFGQGTKLEIK

SEQ ID NO: 546 - protein, 11 aa, Artificial Sequence
  vlCDR1
RASQNINVWLS

SEQ ID NO: 547 - protein, 7 aa, Artificial Sequence
  vlCDR2
KASKSHT

SEQ ID NO: 548 - protein, 9 aa, Artificial Sequence
  vlCDR3
QQGQSYPYT

SEQ ID NO: 549 - protein, 214 aa, Artificial Sequence
  Full length light chain
DIQMTQSPSSLSASVGDRITITCRASQNINVWLSWYQQKPGKAPKLLIYKASKSHTGVPSRFSGSGSGTDFTLTISSLQPEDFATYYCQQGQSYPYTFGQGTKLEIKRTVAAPSVFIFPPSDEQLKSGTASVVCLLNNFYPREAKVQWKVDNALQSGNSQESVTEQDSKDSTYSLSSTLTLSKADYEKHKVYACEVTHQGLSSPVTKSFNRGEC

SEQ ID NO: 550 - protein, 119 aa, Artificial Sequence; identical to SEQ ID NO: 390
  CHA.9.547.12 Variable heavy (vh) domain

SEQ ID NO: 551 - protein, 10 aa, Artificial Sequence
  vhCDR1
GFTFSSYIMS

SEQ ID NO: 552 - protein, 10 aa, Artificial Sequence
  vhCDR2
TISGGGTNTY

SEQ ID NO: 553 - protein, 10 aa, Artificial Sequence
  vhCDR3
WLLSYYAMDY

SEQ ID NO: 554 - protein, 446 aa, Artificial Sequence; identical to SEQ ID NO: 394
  Full length HC

SEQ ID NO: 555 - protein, 107 aa, Artificial Sequence; identical to SEQ ID NO: 535
  Variable light (vl) domain

SEQ ID NO: 556 - protein, 11 aa, Artificial Sequence
  vlCDR1
RASQNINVWLS

SEQ ID NO: 557 - protein, 7 aa, Artificial Sequence
  vlCDR2
KASKSHT

SEQ ID NO: 558 - protein, 9 aa, Artificial Sequence
  vlCDR3
QQGQSYPYT

SEQ ID NO: 559 - protein, 214 aa, Artificial Sequence; identical to SEQ ID NO: 539
  Full length light chain

SEQ ID NO: 560 - protein, 119 aa, Artificial Sequence; identical to SEQ ID NO: 390
  CHA.9.547.13 Variable heavy (vh) domain

SEQ ID NO: 561 - protein, 10 aa, Artificial Sequence
  vhCDR1
GFTFSSYIMS

SEQ ID NO: 562 - protein, 10 aa, Artificial Sequence
  vhCDR2
TISGGGTNTY

SEQ ID NO: 563 - protein, 10 aa, Artificial Sequence
  vhCDR3
WLLSYYAMDY

SEQ ID NO: 564 - protein, 446 aa, Artificial Sequence; identical to SEQ ID NO: 394
  Full length HC

SEQ ID NO: 565 - protein, 107 aa, Artificial Sequence; identical to SEQ ID NO: 545
  Variable light (vl) domain

SEQ ID NO: 566 - protein, 11 aa, Artificial Sequence
  vlCDR1
RASQNINVWLS

SEQ ID NO: 567 - protein, 7 aa, Artificial Sequence
  vlCDR2
KASKSHT

SEQ ID NO: 568 - protein, 9 aa, Artificial Sequence
  vlCDR3
QQGQSYPYT

SEQ ID NO: 569 - protein, 214 aa, Artificial Sequence; identical to SEQ ID NO: 549
  Full length light chain

SEQ ID NO: 570 - protein, 117 aa, Artificial Sequence
  CHA.9.543 Variable heavy (vh) domain
EVQLQQSGPELVKPGASMKISCKASGYSFTGYTMNWVRQSHGKNLEWLGLIFPYNGGTSYNQNFKGKATLTVDTSSSTAYMELLSLTSVDSAVYYCARGVRFALDYWGQGTSVSVSS

SEQ ID NO: 571 - protein, 10 aa, Artificial Sequence
  vhCDR1
GYSFTGYTMN

SEQ ID NO: 572 - protein, 10 aa, Artificial Sequence
  vhCDR2
LIFPYNGGTS

SEQ ID NO: 573 - protein, 8 aa, Artificial Sequence
  vhCDR3
GVRFALDY

SEQ ID NO: 574 - protein, 388 aa, Artificial Sequence
  Full length HC
EVQLQQSGPELVKPGASMKISCKASGYSFTGYTMNWVRQSHGKNLEWLGLIFPYNGGTSYNQNFKGKATLTVDTSSSTAYMELLSLTSVDSAVYYCARGVRFALDYWGQGTSVSVSSAKTTPPSVYPLAPGSAAQTNSMVTLGCLVKGYFPEPVTVTWNSGSLSSGVHTFPAVLQSDLYTLSSSVTVPSSTWPSETVTCNVAHPASSTKVDKKIVPRDCGCKPCICTVPEVSSVFIFPPKPKDVLTITLTPKVTCVVVDISKDDPEVQFSWFVDDVEVHTAQTQPREEQFNSTFRSVSELPIMHQDWLNGKEFKCRVNSAAFPAPIEKTISKTKGRPKAPQVYTIPPPKEQMAKDKVSLTCMITDFFPEDITVEWQWNGQPAENYKNT

SEQ ID NO: 575 - protein, 112 aa, Artificial Sequence
  Variable light (vl) domain
DVVMTQTPLSLPVSFGDQVSISCRSSQSLANSYGNTYLSWYLHKPGQSPQLLIYEISNRFSGVPDRFSGSGSGTDFTLNISTIKPEDLGMYYCLQGTHQPWTFGGGTKLEIK

SEQ ID NO: 576 - protein, 16 aa, Artificial Sequence
  vlCDR1
RSSQSLANSYGNTYLS

SEQ ID NO: 577 - protein, 7 aa, Artificial Sequence
  vlCDR2
EISNRFS

SEQ ID NO: 578 - protein, 9 aa, Artificial Sequence
  vlCDR3
LQGTHQPWT

SEQ ID NO: 579 - protein, 219 aa, Artificial Sequence
  Full length light chain
DVVMTQTPLSLPVSFGDQVSISCRSSQSLANSYGNTYLSWYLHKPGQSPQLLIYEISNRFSGVPDRFSGSGSGTDFTLNISTIKPEDLGMYYCLQGTHQPWTFGGGTKLEIKRADAAPTVSIFPPSSEQLTSGGASVVCFLNNFYPKDINVKWKIDGSERQNGVLNSWTDQDSKDSTYSMSSTLTLTKDEYERHNSYTCEATHKTSTSPIVKSFNRNEC

SEQ ID NO: 580 - protein, 119 aa, Artificial Sequence; identical to SEQ ID NO: 210
  Clone 31C6 Variable heavy (vh) domain

SEQ ID NO: 581 - protein, 8 aa, Artificial Sequence
  vhCDR1
GYTFSSYV

SEQ ID NO: 582 - protein, 8 aa, Artificial Sequence
  vhCDR2
IDPYNDGA

SEQ ID NO: 583 - protein, 12 aa, Artificial Sequence
  vhCDR3
ARGGPYGWYFDV

SEQ ID NO: 584 - protein, 443 aa, Artificial Sequence
  Full length HC
EVQLQQSGPELVKPGSSVKMSCKASGYTFSSYVMHWVKQKPGQGLEWIGYIDPYNDGAKYNEKFKGKATLTSDKSSSTAYMELSSLTSEDSAVYYCARGGPYGWYFDVWGAGTTVTVSSAKTTPPSVYPLAPGSAAQTNSMVTLGCLVKGYFPEPVTVTWNSGSLSSGVHTFPAVLQSDLYTLSSSVTVPSSTWPSETVTCNVAHPASSTKVDKKIVPRDCGCKPCICTVPEVSSVFIFPPKPKDVLTITLTPKVTCVVVDISKDDPEVQFSWFVDDVEVHTAQTQPREEQFNSTFRSVSELPIMHQDWLNGKEFKCRVNSAAFPAPIEKTISKTKGRPKAPQVYTIPPPKEQMAKDKVSLTCMITDFFPEDITVEWQWNGQPAENYKNTQPIMDTDGSYFVYSKLNVQKSNWEAGNTFTCSVLHEGLHNHHTEKSLSHSPGK

SEQ ID NO: 585 - protein, 107 aa, Artificial Sequence; identical to SEQ ID NO: 215
  Variable light (vl) domain

SEQ ID NO: 586 - protein, 6 aa, Artificial Sequence
  vlCDR1
EHIYSY

SEQ ID NO: 587 - protein, 3 aa, Artificial Sequence
  vlCDR2
NAK

SEQ ID NO: 588 - protein, 9 aa, Artificial Sequence
  vlCDR3
QHHFGSPLT

SEQ ID NO: 589 - protein, 214 aa, Artificial Sequence
  Full length light chain
DIQMTQSPASLSASVGETVTITCRASEHIYSYLSWYQQKQGKSPQLLVYNAKTLAEGVPSRFSGSGSGTQFSLKINSLQPEDFGTYYCQHHFGSPLTFGAGTTLELKRADAAPTVSIFPPSSEQLTSGGASVVCFLNNFYPKDINVKWKIDGSERQNGVLNSWTDQDSKDSTYSMSSTLTLTKDEYERHNSYTCEATHKTSTSPIVKSFNRNEC

SEQ ID NO: 590 - protein, 130 aa, Artificial Sequence; identical to SEQ ID NO: 220
  Clone 22G2 Variable heavy (vh) domain

SEQ ID NO: 591 - protein, 10 aa, Artificial Sequence
  vhCDR1
GGSVSSGIYY

SEQ ID NO: 592 - protein, 7 aa, Artificial Sequence
  vhCDR2
IYYSGST

SEQ ID NO: 593 - protein, 22 aa, Artificial Sequence
  vhCDR3
ARDYYVSGNYYNVDYYFFGVDV

SEQ ID NO: 594 - protein, 454 aa, Artificial Sequence
  Full length HC
QVHLQESGPGLVKPSETLSLTCTVSGGSVSSGIYYWSWIRQPPGKGLEWIGYIYYSGSTNYNPSLKSRVTISVDTSKNQFSLKLSSVTAADTAVYYCARDYYVSGNYYNVDYYFFGVDVWGQGTTVTVSSAKTTPPSVYPLAPGSAAQTNSMVTLGCLVKGYFPEPVTVTWNSGSLSSGVHTFPAVLQSDLYTLSSSVTVPSSTWPSETVTCNVAHPASSTKVDKKIVPRDCGCKPCICTVPEVSSVFIFPPKPKDVLTITLTPKVTCVVVDISKDDPEVQFSWFVDDVEVHTAQTQPREEQFNSTFRSVSELPIMHQDWLNGKEFKCRVNSAAFPAPIEKTISKTKGRPKAPQVYTIPPPKEQMAKDKVSLTCMITDFFPEDITVEWQWNGQPAENYKNTQPIMDTDGSYFVYSKLNVQKSNWEAGNTFTCSVLHEGLHNHHTEKSLSHSPGK

SEQ ID NO: 595 - protein, 109 aa, Artificial Sequence; identical to SEQ ID NO: 225
  Variable light (vl) domain

SEQ ID NO: 596 - protein, 6 aa, Artificial Sequence
  vlCDR1
QSVSSY

SEQ ID NO: 597 - protein, 3 aa, Artificial Sequence
  vlCDR2
DAS

SEQ ID NO: 598 - protein, 11 aa, Artificial Sequence
  vlCDR3
QQRSNWPPLFT

SEQ ID NO: 599 - protein, 216 aa, Artificial Sequence
  Full length light chain
EIVLTQSPATLSLSPGERATLSCRASQSVSSYLAWYQQKPGQAPRLLIYDASNRATGIPARFSGSGSGTDFTLTISSLEPEDFAVYYCQQRSNWPPLFTFGPGTKVDIKRADAAPTVSIFPPSSEQLTSGGASVVCFLNNFYPKDINVKWKIDGSERQNGVLNSWTDQDSKDSTYSMSSTLTLTKDEYERHNSYTCEATHKTSTSPIVKSFNRNEC

SEQ ID NO: 600 - protein, 8 aa, Artificial Sequence
  CPA9.086 CDR sequences
GFTFSSYA

SEQ ID NO: 601 - protein, 8 aa, Artificial Sequence
  CPA9.086 CDR sequences
ISYAGEVK

SEQ ID NO: 602 - protein, 14 aa, Artificial Sequence
  CPA9.086 CDR sequences
ARDPLPLHYYGMDV

SEQ ID NO: 603 - protein, 8 aa, Artificial Sequence
  CPA9.086 CDR sequences
SSNMGRRP

SEQ ID NO: 604 - protein, 3 aa, Artificial Sequence
  CPA9.086 CDR sequences
SQN

SEQ ID NO: 605 - protein, 11 aa, Artificial Sequence
  CPA9.086 CDR sequences
AVWDDIGRVLQ

SEQ ID NO: 606 - protein, 5 aa, Artificial Sequence
  CPA9.086 CDR sequences
SYAMH

SEQ ID NO: 607 - protein, 17 aa, Artificial Sequence
  CPA9.086 CDR sequences
VISYAGEVKYYADSVKG

SEQ ID NO: 608 - protein, 12 aa, Artificial Sequence
  CPA9.086 CDR sequences
DPLPLHYYGMDV

SEQ ID NO: 609 - protein, 13 aa, Artificial Sequence
  CPA9.086 CDR sequences
SGSSSNMGRRPVN

SEQ ID NO: 610 - protein, 7 aa, Artificial Sequence
  CPA9.086 CDR sequences
SQNQRPS

SEQ ID NO: 611 - protein, 11 aa, Artificial Sequence
  CPA9.086 CDR sequences
AVWDDIGRVLQ

1. A method of activating T-cells of a patient with cancer comprising administering an antigen binding domain that binds to human TIGIT (SEQ ID NO:97) to said patient, wherein said antigen binding domain comprises:
a) a variable heavy domain comprising SEQ ID NO:160; and
b) a variable light domain comprising SEQ ID NO:165.

2. The method according to claim 1 wherein said antigen binding domain is an antibody, and wherein said antibody comprises:
a) a heavy chain comprising VH-CH1-hinge-CH2-CH3, wherein said VH comprises SEQ ID NO:160; and
b) a light chain comprising VL-VC, wherein said VL comprising SEQ ID NO:165 and VC is either kappa or lambda.

3. The method according to claim 2 wherein the sequence of said CH1-hinge-CH2-CH3 is selected from human IgG1, IgG2 and IgG4, and variants thereof.

4. The method according to claim 2 wherein said heavy chain has SEQ ID NO:164 and said light chain has SEQ ID NO:169.

5. The method according to claim 2 further comprising a second antibody that binds to a human checkpoint receptor protein.

6. The method according to claim 5 wherein said second antibody binds human PD-1.

7. The method according to claim 5 wherein said second antibody binds human PVRIG extracellular domain (ECD) (SEQ ID NO:2).

8. The method according to claim 7 wherein said second antibody comprises an antigen binding domain comprising a variable heavy domain comprising SEQ ID NO:5 and a variable light domain comprising SEQ ID NO:10.

9. The method according to claim 7 wherein the heavy chain of said second antibody has SEQ ID NO:9 and the light chain of said second antibody has SEQ ID NO:14.

10. The method according to claim 1 wherein said T-cells are cytotoxic T-cells (CTLs).

11. The method according to claim 1 wherein said T-cells are selected from the group consisting of CD4⁺ T-cells and CD8⁺ T-cells.

12. The method according to claim 1 wherein said activation is measured as an increase in interferon-γ production and/or an increase in cytokine secretion.

13. A nucleic acid composition comprising:
a) a first nucleic acid encoding a variable heavy domain comprising SEQ ID NO:160; and
b) a second nucleic acid encoding a variable light domain comprising SEQ ID NO:165.

14. An expression vector composition comprising a first expression vector comprising said first nucleic acid according to claim 13 and a second expression vector comprising said second nucleic acid according to claim 13.

15. A host cell comprising said expression vector composition according to claim 14.

16. A method of activating T-cells of a patient with cancer comprising administering an antigen binding domain that binds to human TIGIT (SEQ ID NO:97) to said patient, wherein said antigen binding domain comprises:
a) a variable heavy domain comprising SEQ ID NO:150; and
b) a variable light domain comprising SEQ ID NO:155.

17. The method according to claim 16 wherein said antigen binding domain is an antibody, and wherein said antibody comprises:
a) a heavy chain comprising VH-CH1-hinge-CH2-CH3, wherein said VH comprises SEQ ID NO:150; and
b) a light chain comprising VL-VC, wherein said VL comprising SEQ ID NO:155 and VC is either kappa or lambda.

18. The method according to claim 17 wherein the sequence of said CH1-hinge-CH2-CH3 is selected from human IgG1, IgG2 and IgG4, and variants thereof.

19. The method according to claim 17 wherein said heavy chain has SEQ ID NO:154 and said light chain has SEQ ID NO:159.

20. The method according to claim 17 further comprising a second antibody that binds to a human checkpoint receptor protein.
